United States Patent Application Publication US 2004/0018514 A1 - sequence listing, part 5

SEQ ID NO: 3635 - DNA, 2573 bp, Listeria monocytogenes 4b
  misc_feature (1)..(end): n can be any nucleotide: a,g,c or t/u
taatttttttgttttggctgataggtaagagtgaaaccatccagcaccctccaaattcacggtcttcggtagcggaccccttttttttttcatcagggagggtgaaaaaagcataaagaaggattgcgatctattagtcagctacaagataaccagccagaatatcatgattttattttataatgggtgcatgaagtgaaaacaccggttgttgcaagtagaatgttaattaacaatcctgatttaaatgatacagaaacgattttcaaacaaatcgatgaagaattatcaacaatagataaattagttatgcaggcactttatttttcacgtctagatactttctcgagagactattttattcaggagcaaaatcttggagtagtagtgcgcgaatcagtcaaacggcattctaaacttttcattgggaagaaaatgaagttggatttgcaaaatgtggacatggatgtgcgtacggatagcaagtggcttggttttattttggatcaaatcttgtccaatgcactcaaatacacaaaaagcagtggcgaagtaaaaatttggtgtgatacagaagcatctgagaagaaagtgctacacataaaagacaatggacgtggaattaaggaagaagatttgccacgtgtgttcgagcaaggtttcacgggtaatattggtagacaagagaaaaaagctacgggtatgggtttatacctagctaaacaaatggcaaagaaactaggtcacgaaatttgtattcaatctgaaagcggcgtaggaacagaagtgaaaatctactttgaacagaaagatgattacttactgattgccaaagattaataaaaagtggtacaccaattatgattggcgtatcactttttttgtaaataaaatggttgactctatcgctttatcgtggtagagtattagcaagaagaagtaaaagcgtcgaacagaacaagtagagcgtaattctttaaaagagagtccttggttggtgtgaaaggataaagatagcgttatcgaacacatctcggagctggtttgctgaagcataagtgagtaggtgaactcgggttaagcccgttatagcttgttagtctcgaactaacagaggttggtactgcgaagtatcagcaaattgaggtggaaccacgtgaatattattctcgtcctcttggccaattagcgccaagtgcgacgggatttttttatgttaaaaaaggagcgaagaatgatggattatatcatggagattttaccagcattacttgatggggcaaaaacaacactgctcgtttttgcagttacgttagtttgttcgataccactcggggcggttgtggcagtcggaaatattagcaaaatagccccacttaaatttattttaaatatttacatttggattatgcgaggcacgccattacttttacaattaatttttatttattatggcttaccgattatcggggttgtttttgaccgaatggatgccgtttttattgcttttattttaaattatgcagcttattttgcagagattttccgcgggggatttctttccatcgaaaatgggcaatatgagagcgccaaggttttaggtcttacttacggccagacactgcggaaaattgtcttaccacaagttgtcaaacgtgtcttaccagcaattgggaatgaagttattaacttagtaaaagactcttctttagtatatattcttggaattggcgacttactaagagcagggaaaattgctatgagtagagatgttacactgattccactcgtattagtagctgcaatctacttagctttaacggctattctaaccatattatttaaacaactcgaaaaacgttttagttattataaatgaggtgaagaaaatgttagaaattaagaatctatcgaaaaaatttgatcaaaaaacaattttagataatgtgaatatttctcttcaagatggtgaaattctctcaattgttggtccatcaggtggtgggaaaacaactttactgcgctgtattagtggactggaaaaaatggatacaggtgaaatttttattgacgaggaaaaaattgatccaatgtcgagaaaagatgtggaaaatacgattggtgttgttttccaagaattccacttatttccgcatttaagtgttttagataacttgattttagcaccgacccttgctcgaaaaacaaagaaagcagatgccgttaaagaagcagaacgattacttggcttacttgatttagccgataaagcaaatagtatgccgtaccaattatcaggcggacaaaaacaacgggtcgcgattgccagagcgcttgcgatgaatcccaaagtgctgctatttgatgaaccgacatccgctttagatcctgacttgcgcgatcatgttgcagcattaattttaagtttgaaaaaggttggtattacgcaaattatcgttacacatgatcacacttttgccgaaaaagtagcggatcaaatgatggaagtagaaccattaaaaaaggaggcaatctaacatgaaaaaaggattattaataactgtaatgttaat

SEQ ID NO: 3636 - DNA, 3182 bp, Listeria monocytogenes 4b
  misc_feature (1)..(end): n can be any nucleotide: a,g,c or t/u
tgcaataataacaggcatttttgtttcttcggaaataactgtatctaaattacgtaaaagagctcccccacctgtgagtacaatacctttatccataatatcagctgacaattctggtggcgtattttcaagtgttccttttacagcatcaataatcgctgctactgtatcagcaagtgcttcgctaatttcttctggagtaatttcaatagttttaggaagtccagttactaaatcacgtcctcgaatgctaaatggagataagtccaaaccatttggactagctgagccaatttccattttgattgcttcggcagtacgatcaccaattaatagattatattttttacgaatgtaattaatgataacttcatctaaatcatcaccagcagttcttacagagcgactggttacaataccacctagagaaataacagcaacttctgtagttcctccaccaatatctacaaccatgctacctgtaggctcgccaactggaagcccagcaccaatagccgcagcaaatggctcttcaattgtaaatgcatctttagctcctgcttgacgagtcgcatcaataacagcacgtttttctacacctgtaattccagaaggtacacatatcattacgcgtggtttacttgcattaacacttttaccagctttttgtatgtaatacttcatcattgctgcagttgtatcataatcagcaataacaccatctttcattggacgaattgcaacgatatttcctggtgttctaccaatcatattttttgcatcgctaccaactgcaactatttcttgagtgtcttttttcattgctacaacggaaggttcacgaaggacaataccttttcccttcatatagacaagtgtgttcgctgttcctaaatcaattccaatatctttattaccaaatccaaacatctgtattctccttttccttcgtaatattctacaggatacattaagtttccttattcgtccattaaattaatgttaccttatccctttgtgtcaatgtttctgtttagacacataaacaaccatcttattataacataagtaagactatgagacattaatttttcatgagaaggaaaaaattttaacttttctttaaaaacattttttgagcgttactaaatttactaagaatatacttttgaaaggataaattttcacttaaaaaattcaatcagacaaagaaaaactggaatggcaaacataccgataactattgaaaagacgataatattatctttatatactctccatttattttgcacaataagccacctttacattttattggtactcactttagcataaggtagcaaacgttgtctgtagacattttgtgaacagtattcttgatttaaaagtaacctttttctttcaaactaatatacttattcttgccaatgataatatgatctagtaaggtaattccgacaatattaccagcttcagctaacctttttgttacaagcaagtcttcactagaaggagtcggatcaccagatggatggttgtgaaagcacatgattgatgctgctgatttcctgagcgctaatctaaaaacttctctaggatgaacgatggagcatcagaccacacaaaatcgttgcgattatacttggtttttggtatttaaaaatagacaatggaaatgttcttgaaaaagaaaagcaagctctggcattacaagttttaccgcatcttcgggacacctaacaaccacttcttcctgctccgttacgatgccgatacgtcttccaagttcaatcgcagccatgattttagaagcttttgctattccgataccattaactaactgaaattcttctatagaagcatattgcatttcgcccacgtttttgaatttcatgatgattcgattagctatcgtcaaaactgactcatttttagtccctgtttcaataattaaagcaaccaattccgaagatgaaagtgcttctatcccataattctgtagcttttcgcgtggtttttcattctctgatatttcatgtatcaacataagaacagctcctattttatcaaaatactaatcagcagaaaggaaacatatatatacggaacaaatggaacttgcttatttttcttcactttatttaatatcaatgcagttaataatattattgtccctataataattgctagaaaaaagatataatatcctattttaaaacctaaaaaagtacttaaaataataagtattttgatatcgccaagtccaattccttttcgaaaaataataaaaaaaagaagataaaaaagacagctgattacccctgaaaaaatgaaatccatcaaagtttggttatataagatggcaatgattgccagtacacagaaaaatacaattaatattgagttagggacatacaaataaaaaatatctgtgataaagaaaaaagctaaaaaaaaataaataatgtagtaaagaagaaacgaatatgaaaaagaaaattgaatgtacagaagaagtatatagattggtgttactaattccattaaaaagtagattatcggaataggtctttcacagcatctagactttcctctaaaaaaaagaaaggaaaaaacgggaatgatatgatagaaagcatgtgtcttttgacaaaagttacactccgaaaaacggtataaaaatgattctcccactggaaaacattctcctgcgacttgaatgaacgacctaaatactgcactataaatagctgctaaaaagtacatcatctgtcacctcctaggcggtaaaaacagattaccaaagacgaaatcttttcgcgcatagctaaaatcacttctacaccttctattgcataacaaaaacacctattttcattagtggaaaacacgagcgattatatgttcgatattctgaaaatcctcttgtagctatccgatccttcttatttctcacagtatactcgatgcattcaaaagatcaacgtctggaggccaacagatatttccgcacttctgaattgaaataaagcgatcctgtnactaggttcatagatcgtccgatcagctctgcgcgccggaacgatcaccttatagcttgctgcctgtngctggttcaaagaaatcccttcagttcttcctatttgcactacttcttccgccagcatacctctaggatatga

SEQ ID NO: 3637 - DNA, 3088 bp, Listeria monocytogenes 4b
  misc_feature (1)..(end): n can be any nucleotide: a,g,c or t/u
tttcaaggttttcttatttatttatctgtatcaagtggttttaaatgagccaaaatatcttcgcggcgttcttctaaatgtggcggtaaatcaacgtaagttccatgctctttcgtgaaatcggtttggaaacctggttcatcggttgcaagttcgattaaaatgccattgctttcgcggaaataaagagagtggaaataaaaacggtccacatatcctgaatttttgtagccaaggtcttgaatcatttctgtccagccaatcaagtcgccatctgtcggtacacgaaacgccacgtgatgaatcccgccagcacctaaatttccttgttctaaatcaggtcgcgactccacatgcacttctcccccaagcccaacgtcgccagttttgaatactgtaactaatttatcgtcatcttcataggcaccgatccgctcgaagcctaatatttttgtcaaaagacgatctgttttttcttttttgaaaacagagaagcgcactgggccaagtccgcgaatggcatattctgctggaaccgggctatcttcccaagggctcacctcggttacttgtgtgcttgtttcatcggaaatcaaattgaccggtaagccatctgtgtcttttaaacgaataattttgcgcccgaattggtcgattggtttactgtgaaaaatgcgatgctcatcgagtcttttatcccagtagtgcaaggcttcatcgcttggaacacgtaagctgaggctagaaatcgcattgcgtgatgggtggtttttggccatatttggaacttcaaagaaagttagcgctgtccccggcgaaccgatttcgtctccgtaatataagtggtacgtataagggtcatcttggttaaccgattttttcactagtcgtagtcccattatttttgtataaaagtcaaagttagctcgtgcgttcgctgtaaaaatagatacgtgatgaattcccgttaatttcataaataatcactctcctaatttttttaatagcttaagtagttctttttgttcgtctcttgttaatttatcaaattgagcttgctgaaaagcttcttgttttggcacgttttcgcggtaacacgcttggcctttttctgtgagggtaatatgtttttcgcgccctgtctttgttcgcgtgatataacctaattgttctaatttcgcgaggagttgggtaacatttcccttcgttacaactaatttttcggcaagttgttgctgcgtaatctctttgtctaagccaatctgggcaatgcaatcaaactgcgctgtcgaaattcctaccgctcgcaaattctgattggtcagcttcatattccgattgtaaaatcgactaaatcgaaaccaaagcaaaacccctagcctttcttctttttttaccatgctcgtcccctcctcttgatattattagtttagtactaaactgtattaaaagcaagaaaaaagcctagcacctgtttacaaacaaatactagacttttatttaattacgtattttatagcggaaaataagtaaagttaaagttccatcacgataaaaactcggtggcaattcgtttgtaaacatctaccatctccaaataattctctatagaaacattttcgtttacttggtgaggggtttcgtttcctggtccaaaaataatcactgggaactctttcttagctttggtaaattctgctgcatcggttgttccggaaataccgagtaatgggatttcttctttgacaatgtcgcttgctacgctcttagcaatgtggactaaatccgaatttttatcactaaatactggttgtttgtcataatcaaatattaattctagattcatattttcctgtttatttaacttattgataatcttcactagcacttgtttcactgtttcgttatccatttctggaatcgagcgaatattcccttttagttgcgctttttcagggatactattgacttgatttccaccatcaattacggtgacattatgaataaaatcgcctaatatttcgttagtagcatcaattgatttcacgaatttttctacttcattataaaatagaaacaagttgtcaatcgcattaacaccgaattccggcatcgaactatgcgcatttttaccagtggatttaacggtataattaatggaacctttatgcgcataaacaatccggtgtccactcggttcgccgataatcaagccatctaaatcatctgcgtaacctttttgcgttagttgttcggctccaagttcaccgacttcttcaccaaccgttgctaataatctaattttgccatttagtttttgtttttcttcatgaagctcaatcattgcaataatcatcgccgctagacctgacttcatatccgtcgcgccacgtccgtatattttcccttcatgctctgctgcttcaaaaggtgggaacttccacttcgagacatcacccgcatcaacgacatccatatgccctgaaaacgccaaaactttctcgtcactggaaccaatttcgctaactaggctggctctgtctacgtcgtattgtaccttttcggattcaataccgtgttcagctaacaacttttgcaaatagttcgcaacttgttcttcatgcccattagtcgaatcaatattcacaatgtcttttaagatttgaatttttctttgtcgttccatgtttacgccctctttctttgaattccactctatgttttcccgttccataaaaaggcaaactcatcctcctaatctccaatcaaaaaatggcttagctcctgcataattcacagaagccaagccattaatcgaattattttgtttgacgttttttgcggaataaaactaagcccataccgataagaactgctcctacaaaaatgggaagcacattccattcgtccccagtaattggtaacttgatgttaactttatcatcacttgaactgttcggattatttgttccatcgttattttctgttggttttacagtgatggaattgctagcgtcgggttctacattgatggaattatcatcgtttggttccacattaattgaactactagcatttggttcttcgt

SEQ ID NO: 3638 - DNA, 2232 bp, Listeria monocytogenes 4b
  misc_feature (1)..(end): n can be any nucleotide: a,g,c or t/u
taaatgcagtaatttctttcgctgttgcgtgataagaatcatctagttttccggtcaaagtgtcagaagtagtgatttcgttgccgttttcatctacgtattttactgtgacaggtgcgccttccatttttttatagacatacgtgacagatagtggcgcgtagtcaaaagtgcccatcccattggttggtaatttggaagtatctaattcgtacccatcaattactaattcgtagtcaggcgttgttacatcataatcatcacctacaaatccactaactatctgtggatcatgaatcgtttttccatcttcatctacatagttaactgtcaaatcaccagccaccgtacttgccatgctgataccaaaagttacttggttttgtgggttgttcggcgcattatcaagtacaactcgaatattatgatagcctgagctgaaacttttcaaagaaatactaatgtcagaatttaactcaccttcgtaaagtattttaccagaagactcatctgtaattgttacctcatgaccttcaaaaagttccctatctaacataaactccgcatgcaaatcaataaaagtagaactgccagaaagaaaaggagtaagcaatgtatcattcgttacgttgctaaaataagtggttgttgccgtcaaatgcccactatattgaggtgtagtcgctggataaataaaagttgagtaggagtaaatacttggttccggctctctactattaatggtcacttggttacctgatacatttacttcatttgttcctgttcgattttcgtataagctcaaaggaatttggccaaccagttcgttgttctgtaacgcaattgacgaaatctttccaagtccatcaggaatttttccagtgaattgattgtagtctaatcgaagttctgataaattcgttaattcccctaattcagcaggaatctctcctgatagcttattagaatataaaagcaatttttcaagagatactaaatttttaatctccggtggtacttcaccagtaagcgatttattactcaatgaaatgatcttaattttagccaaatcgtcaaatgttaaatccacaccgacctttttaggcgctaattgtctgtttacttcattaatcaaccacgtctgccctcctaaatcttccgaagtaacaatatcggttgcattatttttcaaattaacttgttggtttgtatccattgttgatttcaattttgttgtttcgattttggatgccaacccagaaagtgggttaacccacataaaatttaatgacaaaacaacagcggataggcatagaaacgcttttttcattcgtgtataacctccagtaatatttattactcctaaaattatacgctaaacagccactcaaaaacgccttcctaagtagcaaaatttcctatttatgaacatttcttgaacgttttatatcacaaaaacagtatttcattccattttcaagtaattatttttgacacattttcacgaataaaaacgaaaataatttactataaaaaatctaattagcaaagattcaaaagtacgaaagtaattgatattacttatttccaattaaaatacaactcaaaaaaaaagcgtttcaaaagataattccaacattttcaaaacatcccaaatcatcgaaatccacttgaattcaacctcgtttttggataaagttacacttttatccatttttacaattttgtcaaaaaaacgtcacaatttaacagctggacacagctaacgaagtctaattttagcactctgataatgtgaaatcatattattattgactgatgaatattgaaaatagtagaaatagtacttttcacatctgctctatttgtttgaagaaatagagttatataataaccacaaaaaaaccgacaaaataaattgtcagttttactttaaaataaatttattatcttttgagaactatttaaatcaaaaaaactgcaacagaatgattcctcatcctattacagtctagcattaagattagctaaatgtgtcagttggtacttttctcgctaggcacataatacctgcaataacagcaagtacacctggaacgatccatagtaatcctactaagaagaaacctacaacaccagctactagcgtcaagataccgaatactntagcattgcgtttaattaatacagcaaaaacaatcaagcataccaagcactaaagncattatagag

SEQ ID NO: 3639 - DNA, 3641 bp, Listeria monocytogenes 4b
  misc_feature (1)..(end): n can be any nucleotide: a,g,c or t/u
ggggacgaaatggtcattatcaggtgcttcgtaatcgactactctcacccattgtctttaatatcgatgaggtatttgcgctttatttttcgatgcttacgttaaagacttatgaaacaacaccttttcatttaagtgtggaaaaattaaaaacgaaatttgaacgttgtctttcagctgaaaaaatcgaaatgcttcgaaaaacagaagaagtatttagtctcggctatataaagcataataatcaatgtgaatttctagatattattttgcaatttacgatggaagagaaagtgtgtcagattaattatgataaaaatgggactgaaaaaacgtatattgttcaattttataatatatcttcggcgtacgggcaatggtatgtgacgagttataacttcgaaacgaaacggatgcaggtatttcgttgtgatagaattcttgggttagaagaaaatgatgcttttgaagccaaaaaattagtggattttaaaagagccgccgaaaatttttataagaaagaagatgcaactaattttgaagtggaaattgcttcaaatggtgttgatttattttttaaagaaaattatccatcaatgaggcttcgacaagagcaagggaaaaattttattcgtggctattataataaaggagaagaccgatttattattaattatttactaggttatggcgataaaataatagccattcagccagattcattacgagaaatgctactaaatgagcttggttccttgcaaaatcactttttaaaattatcgttataaaaaactccgattccattatcggagtttttttatttggatgaaaacatgaaaaaatttattgacttttttgaacatggagaatatgataatgataatcattttcaattagaaagagaggtgggttgtgtatggggcaaaagcttctaggccgatttatgttgctattaagcgttttagcagtggttttgactgtcaattttagtgaaacctttgctgcagaaaagccgaatattgataaaccggtcaaagcattagagcaaactgaaacggcagtggaagcccttgattatcctaaagcgaaggaagcttttcaagaagataaattatggtggtcagaaaataaacaagttgttaaagaaaaatcatatgacttggcaggacaaattgatcggcaaattgctgaaatatcgcttggaattttaaataatgataaacagcaagcgatggatgggatcacttcacttcataatttgctcaagacctatcaagagggtacatatacggataacgaaggcaatacaaacattactctatcaagctatattgcaaaactgactgcgacaaagaagctgatagatgagaaagaatgggcaaaagcatcaacccaaattcaagacttaaaaacagagtggcttgcggtggaaggtgatgtggtcagtcaatcgcaagcagcttacgataataccgagcgcgatttaatgttgcttgatgcttatattaatgatacttctaaacaagccaaaacagcagatgttctagatgggatgacggaggagttaaaaccttttgcagatgtgacttacacttggttcgatgctgcgctaattccatttcgcgaaggacttgaagcacttttgattatcgcgacacttcttacttatacaaaaagaacgaagacacgcgcggcgaaaagatggattatcggcgggactgcagctggtttggtggttagtttggcgcttggcatggtcgtggcattttggctatcagcgcttgcctttggagataataataatttaattaatggttgggctgggctgattgcgagtattatgatgctctatgtcagctactggttacatcgaaattcagatattactcgttggaataactacatggaaggaaaaagtaatcaagcactctccaatggaaaaatgatttcctttgcatttttagcatttttagcgattttgcgggaaggtttagaaacggttgtttttctaattggcatggttgggcggatgtcgaattttgagctgttaatgggaattttggcgggacttggtgtgttgcttattattgcttttgtgatgttgcgatatagcgtacatatccctgtgaagccattctttatgatttctagcgcgattgtgttttacttatgctttaaatttatggggtcaggaattcacagtttgcaacttgctggagtcattccaacatcagtagaagattacttgccatccattccagcgctaagtatttacccatcttggtatagctttttaccacaagtattactcgttatttttggattaattattttaataaaacaacaaattaaaaaaagagtggattctaaaaaggaattcgcacaagggggaaaatcatgaaaaaatggattattgttatgttgactattttaacagcagtattagttgttggttgcggtggaacaggtacagaagataaggcagaaacaaaaaaggaaacaacaaaagaaagtaaacaagcaaatgcggtcaaaaaagaagtaaaagaaatgaaatcaaacttggatgacgtgaaaaaagccattgcggacaaagacaagagcgcgcttcaatctagtgcagctgaactacataaacattggttagaatttgaaaataatgtccgtggcttgtatccattacaatatacagatgtcaaaatatancaccattttataaagtcatctatcatggtgatccnnnnnnnnnnnnnnnnnnnnnnnnnnnnnnnnnnnnnnnnnnnnnnnnnnnnnnnnntnnnatncncttgnnnaagccnnagaaacaaaagcaaaaacttccgaagtgcttgataaagcggtagataattattataaatacgtaacagatcaagtagatgttttcgttgcacaaactgaaatcttcacgaatgctgtgaaatctggtgatattgagaaagcaaaagctacctatgtttcgccacgcttgaattacgaacgcattgaaccaattgcagaaagctttggcgacctagatccaaaaatcgatgcacgtattaacgatgtggaaaatgaagcagactggactggtttccacgttattgaacgcgcgctttgggaaaagaaatcacttgatggcatggacgtttacgcggataaacttttaacagatgcaaaggcgcttcaagcggaagtgaaaaacttgaaattagagccaaaaccaatggtcgcaggtgcgatggaattactgaatgaagccgcaacaacgaagattactggggaagaagaagcatactcgcacacggatttagacgatttaaatgcgaatgtggaaggttcaaaagtagtctaccaagcgattattccagctttaaatgctcaagataaagacttagctgaccaaattgatgcagctttcaacaaaatggaagacacattatcaaactacctacatggtgggtgattcattcgtactctatacaacgcttacgaaagaccaatttgtgaaaatagtggacaattggaggcttttttccaaattatgggccaaaccggtgaaaattttttagcattgaaaggaaaccatggcctgattaaagggggattattcgacggaaaacctgaaacccagggaaaaaaaa

SEQ ID NO: 3640 - DNA, 2641 bp, Listeria monocytogenes 4b
  misc_feature (1)..(end): n can be any nucleotide: a,g,c or t/u
tccaatccaacattcgttacaacttcaatggctggtatgggcgcagacggtcgtcatcgtgtgactaaaacagattatcgtttcttacactgcttagataacctaggaaactcagcagaaccaaacttaactgtcctatgggatgctcgtttaccagaaagctttaaagaatattgtatgaaaatgagtgtaaaacattcctccattcaatacgaaaatgataaattaatgcaagaagaaggctacggcgatatgcaatgtatcagctgttgtgttagcccacttaacccagaagcagacaaagacaaaggtgaaacacataacctgcaatatttcggtgctcgtgtcaacgtactgaaatgtcttcttggagctatcaacggcggtaaagatgatcttcacaaaaaccaagtattcgacgttgtagaaccaattacaaccgaataccttgaatacgaagaagtactagaaaaattcgataaatcaatggactggttaacagacacttatgtagatgcgatgaacatcattcactttatgacagataaatacaactatgaaagtatgcaaatggccttcttaccatctaaagtaacagccaacatgggcttcggtatttgtggattcgctaacgtagtagatagcctaagtgccatcaaacatgccaaagtaaaaactatccgtgacgaagatggttttgtatatgactatgaagtagaaggcgacttccctcgttacggtgaaaatgatgaccgtgccgacgatatcgctgtaatggttcttaaaatgttcaaagacaaattagactcccataaactatacaaagatagtgaagcaaccgtttctgttctaacaatcacttctaacgttgcttactcaaaacaatgtggtaactcccccgtgcacaaaggacctgtatttgatgaaaatggcaaaatcgtcaaagaaccagaattcttcagcccaggagctaacccttctaacaaagcaaaaggtggtttcttagataaccttgctagtctttctaaattaccattccactatgcaaatgacggaatctccttaacaatccaaggagctccaaaaatgttcggtaaaacaacggaagaacaacaccataaccttgttggtattctggatggttactttacaaaaggtggtcaacacatcaacttaaacgttcttaaccacgatgaagtaatcgaaaaaatcaaagctggtatcccagtaatcttacgtatcagcggttattgcttaaatacgaaagatctaaatgaagaacaaaaaatggaactttgccaaagaatgttccacgaaaaattaatcggttaataagaaaaaaagaaccaaatctgcgaataacagatttggttctttttttatgcgttcgaaacttccgccgcataagctcctgccgtgtgcccagtcactagcgcacaagtaatattatatccacccgtataaccattaatatctagtatttccccgcagaaaaataatccttccatcaacttcgattgcatctcttttggtttaatttcctttacagaaaccccaccacctgtcacaaacgctttttcaaaatcaagcgtgccattcacttcaaaagtgaaatcttttaataactgaataaactgctcgatttttttcgggcttacttgtttataatcagccgtttcatctaagtctgctttttcaagtaaaaacaataacattttctcttgtaaaagcgaacttaacgaatttttcaaggctttcttcggattctcttctaacaatttatacacatctttcgaaagttccgcagcggatacattcgggaataaatcaagacgcatcttcaccgtgctagcgcctgttttctttaattctcgaaggacgaacatactacaacgaagagccgctggtcctgacacaccaaaatgcgtgaaaatcatatccatttgatgcgtaataatcggcttcccttttgcatttaaaacagaaagggacacatcacgaagcgacgttccttgtaacactttttgtttaataaaaggctcactagacgtaattggcacttctgtcggataaagttctgtgatggtatgtcctgcttttttcgcccaagcatagccatctccggtcgaaccagtccgtggaacagatttaccgccaactgcaacaatgaccgcactcgctgaaatttcttggccgtctttcagcgtcacccctttcacatgtccatcctcataatccacttgtttcacggctgtttgcatgtaaatttttacgcctagtttttccatccgctgaatcattgcctcagcgacagaacgcgcgctattcgatacaggaaacattctaccgtggtcttcttcttttaacgccacgccaagtctttcaaaaaagcgaataatatcttcattatcaaaggcatgaaacgcactatataaaaagcgaccattaccaggaatatgtttaataatttcttctgctggtcgcctgttcgttacattacaacgtccgccaccagacataattaatttacgtcccaattttggtcctttttcaattaatagtactcgtttatttttctctgctgcactgatagccgccataagtccagatggcccgccaccaataacaattacatcataat

SEQ ID NO: 3641 - DNA, 3006 bp, Listeria monocytogenes 4b
  misc_feature (1)..(end): n can be any nucleotide: a,g,c or t/u
agtgtgctggaaagaactataatgaactagcaaaacaacacggattaacgaaagaaatggtgctcgatttcagtgcgaatattaatccattaggagtcccagctagtttgaaacaaacgataacaacaaatttggacaaactggtagaatatccagaaccagattacttggcgctccgtgcgcgaattgcctcgtttcatcaactcgacctagcgaatgtaatccctggaaacggggcgacagagctgattttcggaatagcaaaagtaacaaaggcgcaaaaagtactcttacttgcgcctacttttgcggaatacgaacgtgctttttttgatgccgaaattgtttatgctgagttaacgaaagaaaccaattttgctgcggcgcaaatcgtactagaaatgcttgaacaagatacggatatcgaagctgtttgtttgtgcaaccccaataatccaacaggacaactcatcgcgcaacaagaaatgataaaaattgctgatttatgtgaaaagcgaaacatatatttaattatcgatgaggcttttatggactttttagaagaaaatgaaacaatttcgatgatcaactatttagaaaaatttccgcatttagcaattattcgcgcctttacgaagtttttcgcgattccaggcttaagactcggttatttgctgacaaaaaatgacttattagccgaagcactcatgcaaatgcgcgaaccctggtcgattaatacatttgctgacttagcagggcaaatgctattagaggatgaagcctatattagacaaacattcgattggattaatgcggaacgagactttttataccgaggcttaagtaaattttcagcgcttaccgtgtaccgaccaagtgtaaattacatatttttccacctcgaaaaaccgtttgatttacgaaaaaaattgcttttaaaagggatttttatccgaagttgcgctaattaccgaggtctcacggagaattattaccgagtggcagtgaaaagtagagaagataatcgccaactcttaaccgcacttgaggtgatttttagtggtaattaaagcgaggtgtccggcatcttgtggcgaacttttgcaaggctggattttaggcggagagaagctaatttcatacccaatcaactggtattccgaagtcactttatctgataaagtaggactaaataactccgggcatacaaaagcatggctcgcattccaaaccacttgcgagtattttggtgtggctaaaagagacctcccgcaagtatctttacaagtgaagtcaactattccggtcgcgaaaggcatggcaagttccaccgctgatattgccgcaacaattggcgctacagcaaaatggctgaataaatctatctcagaagctgaaattgccaagctatgtttacaactagaaccaacggatagcactatttttgaatcactaactttgttcgatcacttaagaggggacatcattcaaagctccaattggatgccaaagctaggcgtcgttgtgttagaaccgcttaccattttagaaacagctacttatcggcaagaaaatcaccaagcgcaattactcaaaaacgaaggacatctagcaaaaggaatggactattttcaacaagccgtcacgcaaaaatccattcacttacttggtaaagccgcatcagttagtgcagcctgcaaccaaactattttgccaaaaccattttggcgagagattgtggaagtgacggaaaacttggatttagtggggttaaatgtttcgcatagtggtaccgttgtcggtatactttatgaactcgaaaaaacggatccactcgaaattttatttgagctagaacggcgctatgtcacgactttttacagtcgatattatttccgtgagtttgtcagtggtggggttcaaattatctcgtaaagcaaattcttcttgcaagcggtctattttatgctataataactttgataaacgaattcgttcatacaaacagttagatactggaagtctggtgaaagtccagcacggtcccgccactgtaaggagttagacactctaagtcaggtcttttatctaattgttttaactggttatactgcttcgaggcaaagcatgtataattcttggttccagtgtagttgtctcactggggcttttttatttgtttttaaaacaaataagcccactgtaaatggtttggtgccgagaagctgaacgagctacgttttatcaagcaccatacgcacaaagatgtgcaccgcttcgttttatggtgggcaatgatcttttcaacgacgaaaagagtgatacaaggaatgtatcttcattgcctatttacaaaaaaagatttgacatttccacgggtttggtttttaataaagtggacaaataaaatattttacggtacaaaggcgtactgtttacttagcaaagaagctttgagttggaagaggaaatttctctactcaaagcttctttttttattttaaaaaaactaggaggtaatctcatgcaaaaagttagttttaaaacagatctttatattggccaaggagcaacagatcgtttactcgattttaaagacaaacaaatctttatcgtaacagatccatttatggttagttccggaatgattaatgcgattacagaaaaaattgatccatcgaatacatatacgatttttagcgaaatcattccagacccaccgattgaaaacgtggtagcaggaattgaagttttgaatgaatgtgatgctaacttgatgattgcaattggtggcggatcagcgattgatgcggcgaaagcgatgaaattcttcggccaaaaacttggtacggtgcgcgcaatgcctttcattgtcattccaacaactagtggaactggctccgaagtaactagtttctctgttattactaacaaagaaaaagccattaaatacccactaattacagatgctattttgccagatgaagcaattttagatgcagactt

SEQ ID NO: 3642 - DNA, 2633 bp, Listeria monocytogenes 4b
  misc_feature (1)..(end): n can be any nucleotide: a,g,c or t/u
attgtgaatgagagcagacgtaaattaagtaaacgtgacggttcgattattcaatttatcgaacaatatcgcgatttaggatatttaccagaagcattatttaactttattgctatgcttggttggtctccagaaggggaagaagaaattttctctaaagaagaattcattaaaatgtttgatccgaagcgtttatctaaatcaccagcattatttgataatgttaaattgacttgggtgaataaccaatatgtgaaaaaattaccactaaatgatgtagtagaactatcgctaccgcatttacaaaaagcaggtgttgtatctgctgagttagatcaagcggaacttgattgggtgcacaaattagtgtcactttatcatgagcaaatgagctatggtgcggaaattgtgccactttctgaaatgttttttgctgacgcagagtccattacgtttgatgaagaagagacagcagtgcttgcggaagagacagttccaactgttatttcagcattcaaaaaagaattagaagcactagaagttctagaagctgcggaagtaaaagcggcaatcaagcgggttcaaaaagaaacgggcgtaaaaggtaaaggtttatttatgccaattcgtattgtgacaacgggtgaaatgcatggtcctgaattgccacttgcaatcgaagttcttggtcgtgaaaaagtgcttaatcgtttggatacatggttgaaaaataattaattttgaatgaaagcatctcggctatttgcggggtgcttttttattttgatatatttcagttgcaaggaattttattgctgttataatagaactaaatatacggaaaaagtgctgatgggaagaagtacggaattctaagtttatagagagagtcgccatggctggaagcgacttagctgaacactcctgaaatgcctccctgaattctgatgggaaatttagtatcgtcagacgaaatgtgggtcgttacccccacccctagagttggagtatttgctaaaattggcaatactcaagtcagagtggaaccgcgcaaagcgtctctgtatcggaggggctttttttgttggcgtaggttccaataaaaaatgtacgaacttgaataaggaggcaacaaaatgccaactcgcttaaaagaagatattgcaacaattataaagaatgaccctgcgacgaaaagcttttttgatgcttttttaacgaatccgggattgcacgcactttggtggcatcgtgtggcgaactttttttatcgtcataaaatggttttgtttggaaaagtattatcgcagaacgctcgtttctggactaatatagagattcatccaggcgcaactattggtagaaggctttttattgatcatggtgcaggaattgttattggtgaaacagcagaaattggggatgatgtaacgatattccacggagttacgctaggtggaactggaaaagattgcgggaaacgccatccaactgtcggtgacggggcgcttgtttcggcaggagcgaaagtacttgggccggtggaaattggagcaggagcgcgtattggagcaggagctgtcgttttaaaagatgtacctccaggcgcaacggttgttgggattcctgctaaggttgttcgtttgaatggtcgtacggtaggacatgcggttcctaaaatggatgaactgacattacgaattgcggaattagaaaatatagtagaaaaacttttgaaggaaaaggagtagatctgattgtcgatacaaatttttaatacgttaaaacgagagaaagagccttttaaaccactcaaagatggcgaagtgaaaatgtacgtttgcggaccgactgtgtataactacattcatatcgggaatgcgcggccaattattgttttcgatacagttcgacgttattttacgtatcgtggttatgatgtgaaattcgtgtctaattttacggatgtggatgataaattgattcgtgcggcaaatgagctaaagttgacggttcccgaagtggcggatcgttttattggggcttactttgatgatgtagatcaactgaatgtggcgaaagcgactgtgaatccacgtgtaacggagaatatggatgaaattattcaattgatcagtacgctaattgaaaaaggctatgcgtatgagtcggctggtgatgtgtatttccggacgaaaaaattcaaagattacgggaaactatctggccaagaattatcggaattgcagcacggggctcgggttgaatataatgagcgtaagcaagatgaacttgatttcaccctttggaaagcggctaaaccgggtgaaattttctgggaaagtccgtttggtaatgggcgcccgggttggcatattgaatgctcggcgcttgcgaaaaaatatcttggtgacacgattgatattcatgcgggtgggcaagatttagtatttcctcaccatgaggatgagattgctcaatccgaagcggcaactgggaaaacgttcgcgaactactggatgcataatgcctttttaaatattgatggggaaaaaatgtccaaatcacttgggaattttattacgctgcatgatgtgctaaaagacaatgatccaaatgtgattcgtttcttc

SEQ ID NO: 3643 - DNA, 3731 bp, Listeria monocytogenes 4b
  misc_feature (1)..(end): n can be any nucleotide: a,g,c or t/u
ctttgtagggttttagagatatggaaagggggaaattgtaggagagtgataaattacgggacggaaaggagatcataatacaatcaacagacatagaatactctctcgtgcttctagaggggacaggaggaacggcaggatgaaggacgggaaatgtaaaggaacgggattaaaagggaagatagttgatatatagagggagagaaggaaaggaagtgaataagataagttgggtgggggagggcggattggagatggtatcgacaagtatgtgagagaaaaggggaatggcggtgcgacacttcttgaagtcagccatagttaattttacgtgaattggagttcaatatgagaaacgttgctcattgaaagaaaggatatatggaagctgtgtgattgaaaaagagacttcgaagaaaggtgcagtgacgcaaatatgcttggtagcatttttaattgagctcattactgggtagctaaggctaccaccgataagaaagagtgtttgtaaataagcattttataaatattacataagaattaaacccctttttaaaaaaaatacaggaacacagcgataaccagattcttcaagtaaatggatagcctcttgtaaagttgcatctccagggacggttgttaaatttattttagggatacaaaggttttttatcaacatgttcttcactccattcttcttccctttcattttaacgtaaagtaggacttttgtatagaaaatcactattatcaggtgggataattcggaaaaaatacgataatttacttatataaatggaaacttttggcataaggtttaaattttctaaaaaaagtgtattattaactatgctatgtaaatttataaacagaaagaaggacgttaacatgcaaaaagaaatgttgaactttgattattataaccctacgcatattatttttggtaaaaaccgttttaatgaattaaatgaagtgattcctcaagataaaaaagtattgattttgtatggtggtggaagtgtagaacgttttggaactttagataaagtaaaaaccgctcttaaatcacgcgaagtaggcgaatttggtggcattgaagcgaatcctacatacgaaacgttaattaaagctatccaactagttaaagaagaaaactatgactttttacttgcagtcggtggagggtcagtgattgacggaacaaaattcgttgcagcgggagcattgttcgacggtgaaccgatggatatttttggtagcggaattggcgaaaaacgtccgattacaaaagcgcttccttttggaacagtactaacacttcctgcaactggttctgaaatgaatagcggtggtgtaatcacttttgtggagaagaaagcgaaacttggctttggtagtgcttatacttatcctgttttttctttacttgatccagaacttacatacacacttccaaaacgtcaacttgcaaatggtattatggacgcgtatgtgcatgtaatggaacaatatatgacttatccagtaggtgctttgctgcaagatcgttatgccgaaagtctactacaaactttaatcgaaattggtccagatgttatcaaagaagataatcatgattataatacacgtgctacttttatgtggtcagctacaaatgcactcaatggaacattatccagaggcgttccgcaagattgggcaagccacagtttaggtcacgaaatcaccgcactttatgggattgaccatgcacgtacgttagcaatagttctcccgtctcttttaaatgttcgtcgcagtgaaaagcatgagaaattagtccaatatgcggaacgagtgtgggggattaagagtggtagtgatgaagaaaaaatagacgctgctattctcaaaacacgcgagttctttgaaagcttaggagcaggaactagatttagtgattatgggcttggcgaggaagtagtggacttactcgttgatcaattagaacggcacggtttaacgaatatttcagaacgcggcgaccaaacgttagaagtatctcgtcaaatttatacaaatgctttataatggataacgaaacttttgcgcaaatcattagagaagaaatttgcttacttaaataaaaatcaatagaaaatgaaagagggcgaaatttcttgagtaccaagaagggaaagacgtttttcggccatccgcgcggcctagctacattatttaacaccgaattttgggagcgattctcctattacggaatgcgtgcattattactttattatatgtatactgcagtagcagatggtggacttgggtttagccagtctaccgcaacagcaattatgtctatttatggttcactagtatttatgtcaggagtcattggtggatggttcgctgaccgtgtcttgggggcacgacagaccattttttacggtggagtccttattatggtggggcatattgtactagctttaccaaatggaggagcagcggcattatttggttcgatggcatttataattctcggaactgggctacttaaaccgaatgtttctaatgtcgttggcgatttatacccagctggcgataatcgtcgtgatgctggttttagtatcttctacatggggattaacttaggtgcatttattgccccgcctattgtttcggcagtttctgataatgctggaagtttccatgctgngtttggtgtggcagctgttggtatggcaattgcacttgttgtttatgtacttacaggaaaacgttacttaaaagacgctggcaaaaaagcgccaaatccgcttcaaagatcagaagcaaaaagtcttacattcaaaataattggcattgttttaggcataggattattaattgctgttttaacactaattacaggtagcttaacaattgatacgattatccttgctgtaacggtgatgggcgtgggggttccactcgcttactttattatgatgatgactagcaagaaaaccgaggcggacgaaaaatcacgattaactgcatacataccgttatttttaattgctgtactattttggatgattgaagaacaaggctcgtccacattggcgcttttcgcggcagaaagaacggatttatctatttggggtatgaacttaaatccggccaatttccagtcgcttaacccagtgtttgttattacactttcgccaattttcgcatggatttggacgaaacttggtgatagacaaccatctacaccacgtaaatttgcccttggactattcttcgctggtttatctttcgttgttatgatgcttccgggtatcttgcacggaaacacaacaacgcttgtaagtccgctttggttagtactaagtttcttcatctgtattttcggtgaaatgtttatctcaccagtcggattatctgcgacgaccaaactagcaccaaaagctttcgcatctcaaacgatgagcttatggttcttgtcagatgcaatggggcaatcatttaacgcacaattaacacaattatttaatgctgacactgaaattgcttatttcggtattactggttttgtagcaattgcttttgcggtagcattattcattttcgcgccattcttgaaaaaatatatgaagggcgttcattaaaggagtaaaacgcgctctctctccttatttggaggaagtgttnntttatgctangaataaattagtttgccattaactcctaagattgctact

SEQ ID NO: 3644 - DNA, 3125 bp, Listeria monocytogenes 4b
  misc_feature (1)..(end): n can be any nucleotide: a,g,c or t/u
gaaataccaacgacgtattcttaatttcatcaaaccaagagggcttgtagctttccatatctcaccagtacattctcgttttaatattggtgtttcatccttgatgtcgctcggtttcccgcttctgccaattgccaatccgactaaagcgaatgtcgaaaaagtgctacgcgaatacaaaccgtatgtgctcgaaacgcatccaaatcattttgttcaatgggcgtcacttgctcgtgaaaaaccagacgttttccaaagtatcaaattttatcattctacttttgatgcgattaataaagaaacaatggcggttttccttcgtacttccgaatataaaaaaccaattttcttacaaatttatggacaaagtgaatgtggtccgatgattttacgtggtcatacgcttcaatctattgaaacgctaaatgcgcgtgatatggggattggcgttcctggtttaacagaagttcggattgttgaccaagatggtaatcctgttccagctggggttagtggtaatattcaaatgctttccaaaggtcgcgcgcttacttattacaaagaagaagctcgttttgaagagaatgtgtacggaccttggtgggatagcggcgattatggtatgaaagatgaacaaggccggttattcttgcaagatcgtcaagtcgatttagtagaaacaattgatagtacactcgcaattgaagataaactgcttgatacgctgactttcttagatgaagttgtcattatccgtggtgaaaatggcagcccgcaaccaattatcgcagttcatgatgataaagaaatgaattgggatgcatggtgggacgcagtttctgacctaccacatatgaatgagccaattgtcatgaaatatgatgaaatccctcgtactgcaacaatgaaagtacaacgtttgcagatggaacgagaattgaaaaaataagtttcaaaaaagcagctgcgttatgcagctgctttttcctttattttcttctaagtgtaagtaatgctaaactcgtaagaaatgttccaataaagattggaaaaagcacatggtcatctcctgttgctggtagtacgatgtggtttatagtatctatatcactcgtattaggagctccctctgtactattttcagagttacctccaccttcatcggttcctccaccgtccccaccagaagatgcatctttactaaactgggcatacaaggttatatcatttgctggcatttgattgtttgtgaagtcccattttgttccaccagttttggcatcataccaacctttaaatgtataaccatccttagttggcgctggtggctcttccagtaaaccttgatactctaccgcttgagtagaaatgacgccatctacatcaaaagttgcggtataactattaatactaaactgggcatacaacgttatatcatttgctggcatcgtatcggctgtaaagtcccattttgttccacctgtttcagcatcataccatccgttaaatgtataaccctctttgactggggttggtggttcttgtaaaagtgtccctgtttcgacattttccgttgtttcttgcccgtcaatattgaaagttgctttaaaatattgtactaatggctgttctacagtcccactgaaatttccagttgcattaccaatcgtatcacgttcaataaaggtatagctgactttaggaatataagtaggtaaattccatgtaacagcttcattcgcatacacaccgttatcgctaattgtatcgggatcaatcgtttgttccgcaatgttttttattaaattaggaatcgttacagtgctttcgaaacttatcggttcgtttacgattaattgattagtcatttgaataattgttagcttcgttaaactgtttaaaggtctaatgttactaattttattttgacttatatcgagccaatctagatttattaaactcgaaagaccagttacatcactaatttgattgtttgatacgtataatgtttgtaccttagttaagccagcgagtggagtagtatccacaatttggttcgctgataaatcaagcaagaaaaggttatttaaattacttagcccctgaagattgttaatttggttttcatttgcatatagaacgcttaaattgcttagcgcttgtagctcatctaggttcgtaagcttattattactaacatttaaggagcggagttgatgtaaactatttactccactaaggttctccaattgattattatataagcctaaaccctttagatttgttaaaccgctcagtggcgtgatgtcagtaacttgcgcgtcgttaatatctagagcttgtaagtttttcaagttactaagtgcgctaatgtcgctaatcggatttccactcagctgaagcatggtcaagttagttaagcctttaagtggcgaaatatcgcttacttgattaccagttaaaattaaagttcctaaattggtcaagtagttcataccttctagggagctgatacctttagaagtaagggttaatgaattaatagtatctaaatctgtttgagtgacaacctctgctgtactagactttccgagtgtagtttgaatttctgtcgctaaagcatcatcgggaaaaatctggctgattgcagctggtggtgcagcggctgcatgtgcgtctatttttataaatacattcgtcccaataacaatcgacaacgccaaaacaacgtacaaaaacagtctccctttggatttcatcttgctccccctgacaaaaagtttaatagtatcttgttcccattttcttatcaccagaaacataaaaaaacagcttgagggcgtccccgagctgttttcatttcatttggtaaatcattccgattgaagctggtgcggactctcgaaaccaaattgtttgtataaccatctgctgtactcggcagatgaccagcgtattatcattttgttaatgatatnttctacatctgatcgacctgtccagnnnannnnnnnnnnnnnnnnnnnannanngggnnnannannnnagnnnnnnccttanncctttacccttgaaacttccnggagcactgctattcagaacgatgacataatactcaccac

SEQ ID NO: 3645 - DNA, 2831 bp, Listeria monocytogenes 4b
  misc_feature (1)..(end): n can be any nucleotide: a,g,c or t/u
gatagttaacttccgctgccgttaattgaatatttagcgcctctaccgcgctttccagatgactttctttttgtgcaccgatgattggcgaagtgatttcatctttatttaatagccacgctaaagcaatcttatctcgagatacttgatgcgtttccgcaagttcagccacacgttcaataatacctctatctgcattcatcatgtcatcgtatttggatttttgaactggatccgtttcggaacgattggttgtttcattcaaatctagcgttaatcgtcctgatgctagcgggctgtatggcgtaatcgcaattttttcatcgcgacaaaacggaatcatttctcgctcttcttcccggtaaatcatattataatgattttgcatggaaacgaattgtgtccaaccgattctttctgcgacgcgttgtgctttttgaaactgccaagcatacatcgcactcgctccaatgtaacgcgctttcccggacttaacgacatcgtgtaaggcttccattgtttcttcgattggcgtattttcatcaaaacggtgaatgatatataaatctacataatccggctctaagcgctttaaactatggtgcgctattccgctaaaaatagttttcctggataaaccaccactattcgggcgatccgggcgcattgtttgttgcaccttggttgctaacacaacatcatcgcggttagcatagtcttttagtgcacgtccaacgattttttcactttcaccataagaataaatattcgccgtatcaaagaaatttatgcctaaatcgagtgctttttttatgatagggcgactgttcgcttcgttcaaaacccatttatgaatccatttgtctttatcaccgaaccccattgtccctaaacagattttcgaaacatccatgccagtgttgccaaatttaacatattccattcaaaaccctcctagttaatttctagtactattacagcataaaccttgaagtccactccaagtcaacctttaactataaaaaaatctctcgggaaatccgagagatttttaacgttttaataaaattggtcaggtagtaaagtttcgccgagtttgatgttatcacggtaatcaattggaatatctacaacgacgggaccttctgtttcaagggcttcttttaacacatcactaagttctgacggtttagttacgcgaagtccttttgcaccgaagctttcggcgaatttaacaatatcgacatcaccaaaacgaactgctgcttctttgccgtatttcattttttgttggaaggcgaccatgtcatagctaccgtcattccatacaaggtgcacaagtggcgcacgcaagcggacagctgtttctaattccatggcagaaaataggaagccaccgtcaccagaaatcgaaaccactttttcacccggatgtacgagtgttgcagcaatcccccaaggaagcgcgacaccaagcgtttgcataccgttactgaaaagcagacggcgtggttcataggaccggaaatgacgtgccatccaaatataatgtgaaccaacgtcgactgtcacagttacgttgtcatcaattgccgaacgcagcgtttgaatgaccgacaacggatgtactcggttagtttcatcactttctggtggaacatctcgctcttctagttgagcatgaagttcttttaaggtttcaagttctttttccgctaattctaaaccgctgaatttcgcattcactcggtctaaagtaagcgcgatgtttccgactaattctgtcacaggttgatagtagtggtcaatatctgctcggatgtcatctaaatgtacaatcgttctatcacccgaagcattccaagcttttggatcatattcaattggatcgtacctactgtaataactaaatcagctttatttagcaaaatatcccctggttggttgcggaagagacctacacgcccaaagaaattatcttctaaatcacgtgagatgacaccagctgcttggaaggtttctacaactgggatgcttgttttttggagtagccgacgaatcgcaccagttacttccgggctagatgctcgcatacctaatagcaatactggtaatttcgcttttttcaaacgagtaacgagtttcgcaacttgttctttggaagctggaccattttctggtttagcaagtgggcgaatcgcttttactggtacgtttggttcattcacgatatcttgtggcaaactgacaaaagcagcgccttggtttggttctgccgccgagcgaaaagcgttagtgattgcttccgggatactttcagcgtgaactacttcttcgctatattttgtaattggacggaaaagtgctgcattatccattgattgatgggtttttttaaggcggtcttgcctggttacatttccagctatcgcaacgactggatctccttcagcagttgctgttacaagtccagtggcaaggttcgatgcgccgggtccactagttacaagtacaacaccaggttttccggttagacgaccgatagcggcagccataaacgccgcattttgctcatgacgactgacaattaattctggtccacgttcttccatcacatcgaaaactttatcaatttttgctcctggaatcccgaatacatgcgtaacaccttgattaattaagctgtctacaactaaatccgctcctgattttccttgtgttattactttttcttggtctttttctagtttcgccatcgttatcatccttttgttatataaattatttaaattttaatagtacagattttataaaaacctcattcacaagac

SEQ ID NO: 3646 - DNA, 4071 bp, Listeria monocytogenes 4b
  misc_feature (1)..(end): n can be any nucleotide: a,g,c or t/u
acggttttagttgcttcgggatcgctaacttttagtttataagcagcgacatgattttcaattaggtcgctcattttttcgatgtgcgttagaacacctttgttaataatcgcaaatcgatccgtaatttgttggatttcgctaagtaaatggctagaaattaaaacagaagtaccatttgtcgctaaatcgcgaatcagcgttctgaattcggccataccttgtggatcaagtccgtttgttggttcatctaagataagtaaagcagggctatgaattaaagcttgcgcaacacctaaacgttgacgcataccgagagaatatgtttttactttctgattaattgcgccagtaagctttacaagttcaacgatttcacgaacgtgttcgtcagtaatatttttttgactcatacgtgcgaattgctttaagtttgcccatccagacatatacatataaaattctggattttcaataatagcacctacttctgaaatcgctgctttatattctgtgtcgacatttttaccattaataaaaacggtaccttctgagcgacgaattaaaccaacgatagagcggattatagttgtcttaccagcaccgtttgggccaagtaaaccaaatacttctcctttatgtatgtcaaagctgatatcgtggacaatatttttttgtccgatttttttcgtgacatgttctaattttaaaactgtctcagtcatgaactcactcctttttttctctcactactaaaattgtactattttttagttctaattacattcggctagaggacgggaaaaaatcatactttagtagtagactcattttctaagttaaggtgccaatctatgctgtaatgatcgattactttcgcgtattttgcgtcccaaaatgtattttgaatcggaatttcgatggtgccggttttggatagtaggacaaaggcatgtacaaaatctgcttccgaactaaaattcaccgcaagtgctaggcgattgcccgcgtctgtttcgccttcgagcgtgtcggagaaataaaataaatctttctcgtctttcgtaagtcttgcatggaggattcgttctccttgttttttatctcctgagaatccttccagctcgtgaaaataacgcatttgcgtaatttctgcttgaaacacttttttataaaaatctagtgcttctgtggcctccccgtcaaaagtaaagtagggaaccgttgcttgtatcattaaatcaactccattcttgttccattatactaattttagtactaaagcgaaagcgcaagccctgggatggacttgcgctttcttctaactttatatattaatggtggacaagttagctagtttcaaacacctttgtaagcttctaggtagatttctttgagttcacttacaagtggttgtttagggttggcagtagtacattggtccatgaatgcgcgatctgcaagtgtatctacaactgcatccaagtcttttttagcaacattttgtcctttaagactcatgtcgataccaacgtctttaccaagtttgatgatttcatctacaagtgatttaacgccttcttctgtagttgctgcagggaagccgataatacgagagatacgagcataatcttcatcagcacggaagctttcatatctagggaataacgcatgttttttaggtttaagtgcgttataacgaataacatgtggcataaggattgcattcgcacgaccgtgaggaatgtggaattcaggtccaattttgtgtgccaagctgtggttaattcctaggaacgcatttgcaaacgccataccagctagggcagaagcattatgcattttttcacgcgcatctggatcaccagtaagaacagattcacgtaagttttcaatacaagttcgattgcgcggatagataatccacgagtataatcgcttgccattacggatacataagattcaattgcgtgagttagaacgtccataccagtgtcagcagtaatgtgtgctggaacagtagttacatattgtgcatcaacaatcgcaacgtctggagttagttcataatcagcaagagggtatttaatgttgttttctttgtctgtaataaccgcaaatggagttacttcagaacctgtaccacttgttgttggaattgcaacgaatttcgcttttccaccaagtttaggatatttgaaagtacgtttacggatatctaagaatttttgtttcaatccgaagaatgaagcttctgggtgttcatagaataaccacatacctttggcagcatccattgcggaaccaccaccaagagcgataattgtatcaggtttgaagtctttcattagttctgcacctttgtaaactgttacgtcagatggatctggttcaacgtcagcaaatacttggtaagctacatcgttgccacgttttttcaggtgttcgattacgacatccacgtatttgaattgaaccattcctgggtcagttacgataaatacgcgttcaacgccttccattttttgaaggtattgagtggaatatttttcaaagaaaatttttggtggaagtttgaaccattgcatattatttctccgatccgcgatacgtttaacgttcagcaagttagtcgcacttacattttgtgatacagagtttttaccgtaagatccacaacctagtgttagggaagggatgaagccgttataaatgtcaccgataccgccttgtgcgcttggtgcatttacgatgatacggcaagctttcatacgaataccaaatgctttttgaacttctttatccgtagagtgaataactgcggagtgtccaagtcctccgtatactaacatttcttcacaacgatcgaatgcttctgcttggttagcagcttcgatgaatgcaagaactgggcttaatttttcgtgagatagtgggtatttgtcgccaacacctttaatttcagctacaagaatttttgtatcttctggaactttgaagccagcttggtttgcaatccatgcaggggatttaccaactacatctgggttaagtgttcctttttcaggattgattacgtagctttctaattttttgaattcagcgcctttaacgaagtagcatttgtttgcttccatttcagctttaacttctttagcgacttctttatccacgatgactgcttgttcagaagcacaaatcataccttggtcaaaagatttagaaagaataatgtcattaacagaacgtttaatnttggctgtttgtcaantgtaagctggtacgttacctggtccaacacctagtgcaggtttaccagtagagtatgctgatttaaccattccagcaccaccagttgcaagtacaagtgctactttatcgtgattcattaattgtttcgttgcttctagggaaggtttttctacccattgaatacaatgttctggtgctccagctgcaattgctgcatcgtatacaactttcgctgctgcagatgaacaacgctgtgcacttggatggaaagcaaagatgattgggttacgtgttttgatagcgataattgctttgaaaagagtagtggatgttgggttagttacaggtgtaaccccggcaacaactccaactggttcagcaatttcaatcacaccagtttgtacatcttcattaataacgcctactgttttgttgtttttaatgttgttccaaatatattctgtcgcgaagatgtttttaatacatttatcttcgtataatccacgtccagtttcttctactgctaattttgcaaggggcatatgttggtcaagtccggcaagtgccattgcgtgaacgatattgtctacttgttcttgattgtaactttcaaatgctttcaatgctttttgtccattgtctgctaatctgtcaatcactttttgaacttctaatacttcttgggccgcattttctttaattgccattttccagaacctcctaatatttgttcgggacttaaaatgtccatagtagacttttaacgtccctgataatccaaaaaaatttagcttgttgctttgccgtattcttttgttt

SEQ ID NO: 3647 - DNA, 3318 bp, Listeria monocytogenes 4b
  misc_feature (1)..(end): n can be any nucleotide: a,g,c or t/u
cctataggcactctccatcgctgctcggcggccacagtgtgctggaaagtcttatacagttgcttaattttcttgatctcactactcgttaatgaagtggtaggttcaggtgatttcgagccaccatcttctttataataagtcgtaatctgattgggtgaaaaagttgtcccaaaaatctttgaaagactttgatttactccatttccaagcccaaatgctaataaaatagcgataattccaatcgaggtgccaagtgctacgagcaaatttcggaattttctattgaaaaaacttttaaaagaaatttttgcagtagcccaccagtttagtcttaactttttttcgtttttgtgggtaactttttggacaacttctttttttctttcaaatgaaattacttctccatctgctaggcgtaataccgcatcagtttggtctgcaatgtttaaatcatgggttacaactattacggttgtcccttttgcggccaaatccttaagcagtttaataatttcatctgaagtaacactatccagtgctccagttggttcatcggctataatcatatctggattattagcgagagaccttgcaatcgctaccctttgcttttgtccaccagatagttgtgttggttttttgctagcaaagtcttctagccccacttgtttcagcaaatcaagcgctctcgcatttcgatcgctttctgctaattcaggattcaaatataatggaacttttacattttcaataacagacatatgattgactagatgaaagctttgaaaaataaagccgatatgattaaaatgataggcatctaaatcaatatcctgtaaatcttccccattgtataaaactttcccttcataatcagtgtcaagtccactaataatatttagcaacgtagacttcccactaccactttttcctataattgctgcaaattctccgtcttgaatggtcacattaatatctttcaaaactggtgtttcgtttttctttcctaacttataagattttttaaggtgtttaatttctaacatttattctcctactttcaaatagtatccatttttttagatttcatatagatgtaactgcctgcaataactgaacataagcctacattccaaacaatagatagaagggaaatatcaaagtgtccattaggtaaaatggaaatgattccagggccgttataaatatgcaagtagtattcagctagtaaattgacaattaggatagcaaagagaagtagaataactgccgctttttgaagagaactcgccttcacatgatcttttaaccaccctaccggaataacaaagtaacaaacaaacatagcgataaataaaaacatcatcaacgttccagaaacaaacgataacgcatcgcctgcttccattcgtcctgtctcaaaaccgtaataccaaataaaggtactttgaagtaaaattacagtaattgctgataaataagcagcaaatagttttccgaaaaatttctttgtttctgaaaatccagaaagagaagcaagtgttacattttctttcgatgtgtcgagtttcgtgattttccaagtcgtaataagcactagaattaggctcattaccgtcgttcctcgaattgctctaaaaagcaaatccgttccctcaagcagattcatcgtgaaccccagaaagttcagccccaagataattgcaagtccaatcaaaagaataggactgatttgttttaaataaaaagtaatcatttttgtcatttgttcatttcctccttatagaaatcgattaatgcgttgcctgtttcctcgcgataagtttctgtttcaatagtttttaacgtgttatctttaattaaccacagtttgctatataatttttcggttccttctaaatggtgggaagaaataatcgtgatagcatctggatttgtttcgctaataatagctttcattacttctgaacgagccataatatcgatactcgcaaaaggttcatcataaagatacaatttggcttttcttgctaacacactaccaattttcactttcattaacatacctgttgatagttcgccaagttttagtcgtttgttaattcgccatccagcaagtaatcggtcccacttatctaactccatattttcaaaaagcaaaccatgttgtttcatataatcttctatagtagtactttttttagcgtaaagttcattatttaaataagcgatttgctggcggatatcattagtagtaaatacttcattgtctaattccaatgtgccactatccggtttcttcaagcttgctaacatatctagcaaggtcgttttcccgctaccattttcaccagtgagcacgatcatgtcgcctggttttgcttcgaggtctacattttgtaagactaatttatttggataggatttagcgatattatttcccactaacatttacttctacctcctctacttttttcacccaagcgataattttttctttattaattcctaatttactcatttcactaataaaattttcggtaagttgttttgcgatgtcattttccaattgctcaattctcctcttatcttctgtcaaatatttaccagtacctcgaacggtgtaaataatttccgtttcttccagttctgcataagctcgctggatggttgtcggatttacttctaactttgttgctaactctcttacagatagtagcttgtcaccagcattgtaaattcctgtaacaatttctgtatgaatataatgaacgatttgtttataaatgggtttactatcatcaaacttcataatttcctcctttcgcctgtctgtccgtatcaccgtaccacctgggtcacactggctatgaatgtactatatcaaaggaaaatcgcttcatttatacattacatatatctaaaatgcgttttttattgcttaaaaaatttttttaattaaaaatgtatacaataagccaatctagataacgtcacaaactgttcataatatttcttttaaagaaatagcgtataataaagtggtcattattcaaatctaagggggaactctcatgccctacaaactcgattcccgcctcggctctccaaaacaatccgcccactgctattcgtctgtgcccgcggaacacccatcccccccctgatcccctctccccgcccaccacccttcgaccgtctccccctcatcccccctcgccccctccctgcgtttcccgcgttcgctccgactccgcccttcagcccttgcccttcccccccccttgtcacgacgcagaacagcaccgaacaaac

SEQ ID NO: 3648 - DNA, 3497 bp, Listeria monocytogenes 4b
  misc_feature (1)..(end): n can be any nucleotide: a,g,c or t/u
ggggtcggacgggcgtaaggggggtggggggatcgtccggggtcgggcgggtgggagaataggggagtttgggggggggcgggtggggggggggggattactcagtgacggggtgggggacgcgggggggcggcgtacgagacggggcgggggggggaggtaaaagagggggggctgtgggggaagcctacccgtcggtcaattcgttgggggggggcggaaaggggagtgggggaggggggtgatgggcgggggcgggggacgacagcacgggcagggggagcgggcatgcgtcccgagtgggccgtagtacgtataccactataagatgccccaagggcgtcatttgagggggaggctttccttcgagggcagagaggagatgcgtgcgtgtgggcgaggtagtggagcagcctggaggggtgatgcgcatggtttggcgatcggtgcatatatgccaggttatgaagatgaggtcataatgtcagctgggacatttattcaaggcgcgagtttgggagtaacagcagatgggcctattagagaaccttatcaactctatgttcaaggcggtttgacctatgaacacatcaaaattgcagttactcgagcaatccaaaaaatagtataaaaaagtaacatttatttgcaaaaaaatatttttaatttttaccgcgatggttttaatcgcggtttttttatgcggaatacattggtatacaacgctttaacgataatgttagaatatcttacataaatttgacaaaacatctgacgtacattataatgctactatcatcaaaaaataattatgttttgagggggaattgtcgtgagtgaaaaggaaatccggagatcgatgccgctgtttccaattgggcctgtgatgaagctaactgatctcaccgctagacaaattcgctactatgaagaccaaggattaatccatccggcacgaaatcaaggaaatcaccgtttgtattcacttcaagacattgatgttttgctagagataaaagattatttgaatgatggtctgaatattgcgggaattaagaaaatgtatacaaatgcagcaaaaagaatctaaagaacctttgacagacgatgatgtgcgcaaaatacttagaaaagaaatgcaacaagctggtcgctttgtaaagcaagatgcgacagggaaacaacaattaccaaggttttaaaaagacaagaagaggtatttactttatttagaagttaatataattagattatttaggaggaatttagattatggcaaaatatacaaaagaagacattttccgcttcgcagatgaacaaaatgtaaaatttattcgtttacagttcacggatatcctcgggattattaagaatgtggaaattcctgttagccaactaaagaaagcactagataacaaaatcatgtttgatggttcctccattgaaggctttgtacgaattgaagagtctgatatgtatttattcccagacttagacacttgggttgtgttcccttggacagctgaaaaaggaaaagttgcaagaatgatttgtgatatttataatcctgacatgactccttttgctggagacccacgtgctaacttaaaacgtgtacttaaagaaatggaagaactaggtttcacagagttcaacttaggacctgagccagaatttttcctattcaaattagatgaaaatcgtcgtccgacacttgaactaaatgatagtggtggttacttcgatttagcaccaaccgacttaggtgaaaactgtcgtcgcgatattgtgcttgaattagaagaaatgggctttgaaatcgaagcgtctcaccatgaagtggcaccaggacaacacgaaattgactttaaatatgaagacgccgttacagcgtgtgatagcatccaaacatttaaattagtcgtaaaaacaattgctcgtaaacatggtttacacgcaacattcatgccgaagccgctctttggtgtaaatggttctggaatgcatttcaatatgtcactatttaatgaaaaaggaaatgctttcttcgatgaaagcggagaactagaattgagccaaacagcttatcatttcttagcagggatgttaaaacatgcccgtggctatacagctgttacaaatccaaccattaactcattcaaacgattggttccaggatatgaagcaccatgttacattgcgtggtcaggtaaaaatcgtagcccgcttgttcgtgttccaagttctcgtggactaagcactcgtcttgaattacgtagcgtcgatccatctgctaatccatatttagcaatggcggtactacttaaagctggtttatctggaattaaagatgaattaactcctccggcaccagttgatcgtaacatttacggcatgaacgaagaagaacgtgaagcaactggcatttatgatctaccagaaagcttgggccacgccttaatcgaacttgaaaaagacgatattatcaaagctggtttaggtgagcacattttcgaacactttattgaagcaaaaacaattgagtgtgatatgttccgcacagcagttcacccttgggaacgcgaacaatatcttgaaatttattaatagtcaaaagcacgtttcctatagatggaaacgtgcttttttattggaaaatcggtttcaaatgtttgatgtttggcaaatagaggcatatatttaaaaatgtgctagtgaaagggaggttttcattagagaaaggggaagaaatgcagattactttagctattttagtatttgccttcacattattttttgtgatttggcaaccaagaaaattatcaatcggatggtcagcttgcggaggtgcgctaattgccatattacttggcgtcgtcactttatcagatgtcgcaacagttactggaattgtttggaatgcgacgctcgcttttattgctattataattatttcattgattttagataaaattggcttttttgagtgggcggctttacatatggcgcgattagcaagaggtaatgggttattaatgtttattcttatttctattttgggagctttcgttgctgcgttgtttgctaatgacggggcggcgctaattttgacaccaattgttctagcgatggtgcgagcgctgaattttgatgagaaaaaggtatttccatttattattgctagcggttttatagcagatacgacgtccttgccgctcgtagttagtaatttagtcaatatagtttcggctgattttttcggtattagtttttcgcagtatgcgcttattatgtggattccaacgcttttctctttagttgcgagtattttaatcttatatttttattttcggaaagcattacctaaaaaatatgatatgcgagtgattcgagagccagcttctgcaattaaagataaaaagatgtttcgtgtttcttggggaatacttatcatccttgtagcaggctattttttgagtagttttttagatattcca

SEQ ID NO: 3649 - DNA, 3702 bp, Listeria monocytogenes 4b
  misc_feature (1)..(end): n can be any nucleotide: a,g,c or t/u
gttaaattttgctaaaaatccactcgaagcacttcgaattatagccaagcaagaaacaattcgtgtcgatatcggtaaagccaatgagaccgaatttttcattaataacgcagctggtgggaaaataaccgaaataacttatgctgtaaaagaatcaatgaaatccaaatggggcagacttgcttatctgtttagcggtttaactgttcttccaaaactatcaccagtgtacgtcgaaattgcatataacgataaaatatttaaaggtgagattttgctgttttttgtaaataagtccaactcggtcggtggtatggagacattgtgtcctcctgctgaattaaatagtggaatgtttgagttattaattttaaagaaagtctctcctaaaacattatttcaattatttgcttctataaaaaagggtacacacttaagtagtccgcatgtaatccatgcgcgaacaaataaagttactataaacagcgaagcagatttaaatgttagctatgatggtgtatatggaggaaaagcaccgtatacattagaggtaatcccagaagcattagaagtatttgctgatacaaatcggatttcttcccgtcttagaggctaaagcgtttacactagaaaattttctagtttttatggtaaattcatcacaaatctgttatcatatgtttgttaggggaaaatagctgccactatttttcacggcggaaattcaaatcttagggaaaatcaaaatggttttcctaaattcctgagggaggaaattgtattatgcctatcgttaacatgacagacatgctgaaaaaagcattagctggaaaatatgctgttggtcaattcaacatcaacaaccttgaatggactcaagctattttgaaagctgcagaagcagaaaaagcaccagttattttaggggtttctgaaggagctgctaaatacatgggaggattcaaaacagttgtaaaaatgactgaaggacttgtagaagacctgaaaatcactgtacctgttgcgattcatcttgatcatggttcaagctttgattcttgtaaagcggctatcgatgcaggattctcttctgtaatgatcgacggctctcaccacccaatcgacgaaaacattgcaatgactaaacaagttgttgactatgcgcatgctaaaggcgtatctgttgaagctgaaattggaactgttggtggagacgaagacggagttactggcggaatcaactatgctgatccacaagaatgtttacgtgtagttaaagaagctaacattgatgcactagctgcagcattaggttctgttcacggtccttaccacggcgaacctgttcttggttttgacgaaatgaaagaaatctccgaacttacaggtgctccacttgtacttcacggtggttctggaattcctgaacaccaaatcaaaaaagcaattgaactaggtcacagtaaaatcaacgttaacactgaatgccaaatcgtttggactgcagctgttcgcgaaaaattagctactgatgacaaagtttatgatccacgtaaagtaatcggccctggtgtggacgcgattatcaaaactgtaacagaaaaaattcaagagtttggttctaacggtaaagcgtaagacgaactttatgatgatataaaaataactggtaggatcacttgttgattttaccagttattttttatgtatcgcgagggttagtatagagggaatttaattatcgttattaagactaatatggtatgataactatagctttcatttaatagactgaatcaatctaaatttcccgataaaaaatcatgcttcaggcgcatgttttatctaaataaatgagccataatgtagttagttatgtgatacgacttactatagttatgttataataatatattaaatgatgaatgaaccaacgaggaagagagtaggcgatagtaatgaatatagggatttttacggatacctacagtccgcaaattagcggtgtagctacatcgataatgattatggaaaacgaactaagaaaacaagggcacactgtgtatatatttacaacaaccgacccaaacgctgatagagagagcgaagagggccgtgtgtttcgtttaccaagtattccgtttgtctttttcccagaacgtcgcgtagcaattgctggaatgaataagtttattaagctagtagggcgcttggatttagatataattcacacacatacggagttttcattaggtctattaggtaagcgaattgctaaaaaatatcatattccatctatccatacctaccacacaatgtatgtcgattacttgcattatattgcgaaaggtaaaattttgacaccttctatggtgggtaaaatgacaaaatcgttctgtgatagctatgatgccataatcactccaactgcaaaagtaaggcatcacttagaagagcaaggtatccacaaattaatgtacactgttccaacaggcacagatatttcatcgttcgcgccagttgaaaaacagcgaattctaaacttgaagaaactacttggtattggagaaaatgatccagtgatactatcacttggaagaattgcgcatgaaaaaaatatcgatgcgattattaatgcaatgccagaagtccttcaaaccaaaaccacagccaaattggttattgttggcgatggtcctgtgcgcaaagacttagaaaaattagtagaagaaaaacaattagcagatcatgttattttcactggtgcagtagactgggaaaatattagtttatattatcaattaggggatctgtttgtgagtgcttcaacgacagaaacacaaggtttgacttatgcagaagcaatggccgcttctttaccagttgttgccaaacgtgatgaaagtattgaaggctttttaagcgacagagaaacagcctttttattcaatgaagatgatgagcttgcatcactgttaataaatatactttcagacaaaaatacagccacattggtcgctacgaatggccgagtaaaagtggaatccatttctgcggatcaatttggaatcaacattgaatctacatacaatgaagttcgtgaaatataccgagtaaagcgccaaaatgggacgattaaagtaaagcccacgctgataaaaagtaaaatagcttcacaagtattttcactatcatcttctacacacgttcaaaggaaagagaggtcatcgcggcgtgattaagttgacaatgctatcttcggcagaaaaagtaaaaggtcagggtgtggcatcagcttaccgcgaacttgtgaatttgctagaagaacgatataagaatgaaattgatatgaagattaatagttttgagaaatcggatatcacgcattaccataccgttgatttccgtttttttctttcgactttttttaagaagaaacgaggcgttcgggtcggatatgtccattttttacccgaaacaatggaagggagcctcaaattaccttggattgcccgcgtagttttctataaatatttgattggtttttataaacgaatggatgagattgttgttgtaaatccctcttttattcccaaacttacggcttataatattccagcagaaaaaattcattatatcccgaatttcgtttcaaaaaagagctttttccccatttcaaaaggagaaaaagaacttgctcgg

SEQ ID NO: 3650 - DNA, 2603 bp, Listeria monocytogenes 4b
  misc_feature (1)..(end): n can be any nucleotide: a,g,c or t/u
acattgcgatttcacggaaaaagagcgataatagacaataactttatccgaaaggtcagaaaatttcgcatcatccaaaaacaacgctttcggaagctaaaaaattcagatcaggagtgtgttgcatgaaagtaattaaatttggcggaagctctttagcatcggggatccaattaaataaggttttccaacttgtagcggaggatcctgataggaaaatcgttgttgtttctgcaccaggtaaacgtttcaaggaagatacaaaagtgactgacctacttattgattgcgcggcaaaggcacttctcggggaagatacaagtgaattgttttgaatctgtcattgcaagatatgcagggatagcgctagatacagggatgagcgacgaaattatcaatcaaattcgcgcagatttacaagcaactatctcatcggacaaaagcgatcctgataaatttttagatcgaatgaaagctagtggcgaagataataacgcaaaattaatcgccgcttactttaaatttaaaggcttaaacgccaattatataaatccaaaagatgccggtttacttgtgacagatgaacatgctagcgcgcaagttttaccagaatcctatgatcgtttgtttgcacttcgagaaagagaaggcattattgttttcccaggatttttcggttatacgaaagacggcgaaattagcacgttttctagaagtggctctgatattactggagcgattgtggcaaacggcgcccaagccgagttatacgagaactttacggatgtggatgcagtctacgcagtcaatcccgctatcgtgaaaaatccgaagaaagttcttgaactaacttaccgggaaatgcgtgaactttcatatgccggcttctctgtttttcatgatgaagctttaattccggctttccatgcaggtattccggtgcatattaaaaatacgaacaatcctgattcttgtggtacgcgtgtcgttcatgaacgcgaaaataacaatggtccagtcgttggaattgctagtgatgacggcttttgtagcatttatattagtaaatatttgatgaaccgagaaatcggcttcggacggaaagtgttgcaaattctggaagatgctgggttgaactatgaacatatgccgtctgggattgatgatttaacgattattattcgcgaaaatcagtttggcgaggataccgagcagacaattatgtctcgtttgaaagaagaattgaacgcagatcaagtgattatgcaacacgggatttcgctgattatggttgttggtgaaaccatgcgccataatgtcgggattacgtctcgtgcttcaaaagctttatccgatgcgaaagtaaatattgaaatgattaatcaaggttcttctgaggtgagcataatgtttggtgtgaaagaagaacaagaaaatacggccgttcgcgcactatacaatgaattcttttcagaagtcttagtctaaaaaaacaagtttctcatcctgattgaggagaaacttgttttttattatttaatcacttcttctaattgatagtctttggcaattacgtcaataatataatcataagtgctaacgcggtaatgcttaaaatcttgagcgttatagtcatctcttattttcactcgttcattgattaaatccgaatcctgtatctgttcaaaattgctctgacttgttaaccaactagtactccatttgcttttttcgtaggtgtcaagttcggtggatgagtggaaaataaacccgttaaaaatcatctttaggaacatgctttcttcaaggtctacttctatagatagtgtgagttggtcaggagtatggtttaagctgataagccatatttggtctctgccgtaaattagttggttgttgatttttattgggtgggatgtttccacagatatacaattcctttcgacgagtaacttacctatttttactactattcactctttgagcagctttattcactaaggtattttccccataaataataaaaaatacctttaagttaaatcttagtatgtattttataacctagcatcttttcgattttcttttttcgattttttagttgattcattattaaattatttgtatttggagatatttcatcaaatttcttttgagctctttttgcatatgaaataaagttaccgtgattattataattctttcctaaatctgtacacaatccataaatttttttcttataaggtaaatcagtcaattctttttttacttttactttctgagcaaacgttataagtttttttgcatttcggtaaaatttatacggactcttccctctcattttaactgtagtgccatcaaaaacgaaacctaaataatctaaatggcttacttcattgctaattatgtcaaaaattttatcattctcgtataaatacagtcctgttttatctttatgcaactctattttatattccgaagctacccttcttgtatcagtttcaatccttctaattttttgctcatttactatatcgctttagggatactagctaaatcatcggatctgttattccaaattcccgaatcttagtcataatcat

SEQ ID NO: 3651 - DNA, 2910 bp, Listeria monocytogenes 4b
  misc_feature (1)..(end): n can be any nucleotide: a,g,c or t/u
ctaacttcttggcacttggaatggacctgctgtttatcgtcttacttcttggactaattcatttatttgcaccggttcgctcgcacatttattggtatgcgggaatgtctttatttattgggattttaatgctcgtgtgtgtactttacgcccggttttataatgaagttccaacatatcacagcttctctcttatcggcgaggttggcgtagttaaaaacagtgctacaagcctgctaagcggaacagactggttgtacatcctagatatcgttttactcccatttatcctttatttccatatcaaaaaaggacacgagttcccttcattccgcataactagccgtgtttatggcgtatcatttattagtacgctactcgttttaagtggttttacttattttatgatgcaacaaaacattatcagtgactccaagcgcgcaaaacgaatgggaattttcacatttaatatcagtaccgcgcttactggtgcagatcatgttaaagccgcagatattactgcaaaaaacgtgaatgacattaaaggtgtgtcggttaagtcaaatcccgattacttcggtgctgctaaaggaaaaaatcttattatcgttcaactcgagtcattccagcgtaatttaacgaacgtcaaaattaacggtcagtcgattacgcctacattagatagcttacaaaacgaaaccatgtattccaaccaatttttccaaactgtctctaagtcaaatacggctgatgcagaatggtccgtttatacatcgactttcccaagtggatattacacgaacacacaaacttacggcgaccgggtaatcccgtctatgcctcgtttacttggcaaaaatgattataaaacagcgaccttccatacaaatgatgctagtttttacaatcgcgatgaattttatcctgctgtaggatttgataagttttatgatcgtaaattctttggcgatgaggacgttattggcttttctcctagtgatgaagtgctttataacaaagcctttccgattctagaagagcagtacaaaaacaaccaaaaattctatgcgcaattaattagtgtaagtagtcatatgccatttgatattccaaaagataagcaagaaatcgacttaccgagcgatttaaaagatacagaacttggtaactatttcgaagcggttcattatgcggataaacaacttggtgaattcattcaaaaattaaaagatagcggcatttgggatgattctgttgtcgttttctacggcgatcatcacattatcaaaaccgaccaactacctgaggaacaaaaaaaatacgtcaatcgttctactgagttaaaagcggatccagccgatgattaccgtattccgttcttcttacattatcctggcatggaaaaccctggtgaaattaaaaatgttggtggcgaaattgatattatgccaactgtcatgaatttacttggtattaaaactggtgaccaaattatgtttggaaccgatatcctcaattcatcaaataattacgtacctgaacgctacacaatgccagaaggaagttatttcaccaattcttacatgtaccaaccagatgaaagtttcgaaactggcgcagcaacgaattatgatggaacaaacaaagaactttcgagtgatgtaaagaaacgctttgacgctagccgaaaactcttacagtattctgatagctatgtaaacaatttaccattacgagacgaagataaataaacaaaagaagtatccagcaaatctggatacttcttttttcgcttattttggtaaagcggcttgatgttcattaaatttttcaatactttcaagcgctagaggtttgttcatcatttgtaaaaataaatcatagccgatggtaaccgtatcagctccactagctagtgcttgcataatttgacgactatttttaaagcttgcacccataattttcacatcttcaagtccttgtaaatctaacacgtatcgcagttcttctattgttttcgctgcgtctagtccgcttacttccatgcgattataatatggcgctaaataatctgccccagagagcgctgcaatataaccttgttccgatgagaaaattgctgttgctaaaataatttcatttggaaaattagcgcgaacttttgcgatgacttttatcccggcttcgtgggctgggattttcaagccgattaccgtaccttctgccggctcaattgcttgaattcgaaggacatcttcccagatttcctcttccgttaacccagccgcttgcacaaacacaactttggctggaatattcgctatatgcgtgtttctcggcttattctcctttaataaaatagtcggattagtggttacaccttcaaaaaacggaaattgaagcgctttctttatttcctctaaattccccgtatctaaaaacatttcctcactccttcaaagttttcttctcattttaagtgtagaaaagttccacgagccagtcaattgtttctgagacccaaagttgttggcgattttgtacaacaaaaaacacctccacgtgccgaggtgttttttaccgctattttttcttcggttctttcttccaatttttccgcttgaattcaaagcgttccatccatggtcggccttttttcagtgcaaaatagccgacgatgacgataaatagtgcgccgataatatcgacaataatatctgtcatcgtatcttccagtgcggcgcggccagtgagcggtgttccattagatagattataacgttgcatatttaagttcataattccatcaaaagtatactcatacacttcccagaaagcccccattgtcaccgcgaaacaaaacgcgaatacagcgataaaacccggtttaagtttcatgacaactttgtt

SEQ ID NO: 3652 - DNA, 2832 bp, Listeria monocytogenes 4b
  misc_feature (1)..(end): n can be any nucleotide: a,g,c or t/u
agcatgcttgagcggcgacatgtgctggaacgttccattacattataaatcgtttctaaaaaacgatcaaagtaactaataaaggcataaattgtaccaatcgctaccggtcctattaatgactctgcaccaaagaaactaagaataatcactacagccaacgcgtaaatcaaatcaatcgccggtccaagtaatagcgcattaaatttgatatttttcattccgacgtcatagtaatctttattgattttctcaaattcttttactaaacgacgctcttgattaaattgttgaactatcgacattcctgaaatcgactcagcaatttttgcatttaattgacttaatttttctcgtctcgcccggtaaaactgcgaactgtatttccggtaaacaaaaataataaagacaataagtgggaataacagcaaactatataacgctaattgaacattgagcgcaaacatcgccgcataaatccctacaagcataaacaaactttggatcgctgttgaaagcacattaataaacatatctttcaccgcttcggtatcatttgtcacgcgcgacacaatgcttcctgcaggcgttttgtcaaaataacgcatacctagcgaatgaagttttgtaaaaatatcaatccgcatttgttgcacaatttcaagcgcgattttttggaagaacagcagttggaaataccaaacaactgatttcccaatcgtaagtcccaaatatcccgcaccaagaattagcaaagcctgcatttccaaattcatcggtgttaaataatcatccaaaaatatcttaatcaagattggtgcaaagacatccgcaagcgttacgagaagaacaagcacacctgtccaaatcaaactcggaatatgatatttggtataactaagcattctttttaaaacctcgcgatgttctttaccggacatcactaacatttcatcttgttcattcatcgcttccatctgctgcacccccttcttctagtgcttcttccagttgttgctcgtggaacatttctgcataccagccatctaaagccattagttccttatgcgttccacgttccacgatctgccctttatcaatcacgataattagattcgcatgttcgacagagctaagtctgtgtgcgctaatgattgtcgttttatccgaacgattctcttttaaattagctaaaatttgttcttctgttttcgcatctactgccgaaagtgcatcatctaaaataagcaattcaggattcataattagcgctcgtgcgatagcaagacgctgcttctgaccaccagagagtgaaaccccgcgctcgccgacaatcgtatcatagccattttcaaaaccaagaatatcttcatctacagccacaagctttgcaatcttcgtcacttcttcttgcggtgcatctggttttccaaaacgaatattatctcgtaccgttgtggagaataaaaactgatcttgcggcacatagccaattgcttctcgtaaagctcgaaccgtatagtcttgaattttcacgttagcaaaagcaatcttaccttcatacgtatcatattctcgcattaaaagctttaataaggatgttttcccagaaccagttcgaccaacaatacccagtgtttccccagcttttaattcaaaatgaatatctgacaagactggttcactctcatcaggataggtaaatttgtccattgcaacttgtaagtccccaactggaaccgtatctagtgcgccctcctggtcaagtacatcttctttttcggcgagtaaatgttgcacacgatcataagaagcattcccgcgttgaataatattgtacaaaaatccaaatgctaacatcggccaaattaataagaataagtagttcgaaaaagcaatcacttgtccaatagtcaactctccatccacaacgaatttcgcgccaaatcctagtgaaagaacaaatgaaatccccacaataatggaaatcatcggatcaaacatcgcatccactttagcgacagaaatattttttttaacgacttctttggtttgttttgcaaaatcttgaatatcttctttctcttgtccaaatgtccgtgttactttaatgccagaaatactctcttgcgttttatcattcaacattgaaaaagcagcttgtgccccgtggaaacgatcgtgtaactttttacctaaaatcgaacttccgagtaccataaacggcattggaagtaatgcaatcaaggttaggcgccaatcaatcgttattgccattgtcgcaataaccgttccccctgttagaacagaatctgatagggtcaaaacgccaatccccgctacttgttgaatagctgtaatatcattcgtcgcatgggccattaaatccccagtacgataacgttgaaagaaaaatggcgacatcttggtaaaatgttcaaataatcgtaaacgtaaagtgcgttgtaatttattatcagaaccaaaaattaacatccgccaaacatagcgaccaccgtatgcaagaatcgctgctacaactagaataatcatccatttaatcaatttgtcttttgtcagtgagtcgttcgttacggcatcaaccgtatagccaataatttgcggcggaactaactgtaaaagcgcaatcgtaaacaaaatggttactccaaatgcataagatttccaattttctttaaaaaaccaacccaatgctttataaattttcaaacaacaatccctcccttttctccttaaaattggacaaataaaaataatggaccctttccagcacagtggcggcgctcgagcatgctgctaagtggccgaggc

SEQ ID NO: 3653 - DNA, 2389 bp, Listeria monocytogenes 4b
  misc_feature (1)..(end): n can be any nucleotide: a,g,c or t/u
cgacagtgccgctggaaagaccaaaagaatggatgaacctcgctgaggataatattacaaaagtatatttctgatgatcgtattgtagtcattgaaggcggagaagaccgcaatgaaacaattatgaatggtattcgttttgtggaaaaaacatatggcttaacagatgatgatattatcgtgacgcatgatgctgttcgtccatttttaacacatcgtattattgaagaaaatatagatgctgcacttgaaacaggagcagtagatactgttattgaagcacttgatacaatcgttgaatcaagcaatcatgaggtgattacagatattccggtcagagatcacatgtatcaaggacaaacaccgcaaagcttcaatatgaaaaaagtattcaatcactaccaaaatctaacaccagagaaaaaacaaattctaacagatgcatgtaaaatttgtttgcttgctggcgatgatgtgaaattagttaaaggtgaaattttcaacattaagattacgacgccttatgatttgaaagtagcgaatgcgattattcaggagcggatagccaatgattaatcaagtatacagacttgtgtcagagagacagtttgaagttgccaatgtggacgaatcattaacaggtgatgtggttgttgttcgaccgactcatttatctatttgtgcggcagatcaacgttactatacaggttctagagggaaagaaatgttatctaaaaaacttccaatggcgcttattcatgaaggtgttggggaagttgtttatgatgcaacgaaagaatttaaaccaggtgcaaaagttgtcatgattccaaatacaccatttgagaatgatccagtcattgctgagaactatttacgttcgagtaaattccgttctagtggttatgatggtttaatgcaggattatgtgttcatgcgtcgtgatcgtgtggtggcactgccggatgatattaacatgaaagtagctgctttctcagaactgatttccgtggcagttcacgctattttacgctttgaaggtaaaagtaatgctaaccgggaatctttcggtgtgtggggtgatgggaacttaggttttatcacttctttactactaaaaaattggtaccctgatagcaaagtttacatttttgggaaaacaccatataaattagacttcttttcttttgtggatggtgcttatgcaattgatgatgttccggctgatttagttattgatcaagcattcgaatgtgctggaggaatgggtagtcagtatgcggtgagtcaaattattgatgtcattaaaccagaaggaaccatttccttacttggtgtttcggagtatccgattgaatttaattcacgtatggtacttgaaaaaggactaaccgtttatggaagtagtcgtagcggtcgtgttgattttgagaaaacagtggagttcttatcaaccaataaacgtggggtagaatatctgcaaaatcttgttggggaagttcatacagttcattccattcaagatgtaatcgaagcgtttgaagctgatttacgcagtccatggggcaagagcgttatggagtggaagatataataaaacattggggagtttaggctgtatgctaatgaatttgtttgctaaagtattttaggaagcaagaaaatcgaatgtaagtattcgatggtcatttgctaaatccttaacttcccagcttttatatggagagggaaaaagaatgaaatttgctattataatgcctttttacaatgccgaaaaaaggttagcactatccatagatagtataattaagcagtcttacagctttttgaagcatgtggaagtactgcttattaatgatggaagcacggatggaagtggcgctatcgcaaatcgttacgctacacaatatcctaacaatattcgcgtgttggccgttccaaatggtggaccggcaaaagcgcgtaatatcaggaatccataatgtaagtggacatactgattttgttggttttttagccccccataatataatgtcagagaatatgttagcgagtatagttacttttccaaatgagtatcccgtttttatgctcgtgccagcttattatgtcttagacggttttgttagtaagtgaaaacatttcaaaacatgactttaatggcctatttcccgatggagatcaagttgctgttattgcaaaacatccgccagcttaatcgtttttatacaggcggggcttctgtaagttatgcactgtcagccagcattccctttccatttgtggctctggtatccaagcatcggctaattatccaccccgttccagcacatggggggccggttctccggtcaagagcacgatncgttgccgcagtttctttnaaaag

SEQ ID NO: 3654 - DNA, 2377 bp, Listeria monocytogenes 4b
  misc_feature (1)..(end): n can be any nucleotide: a,g,c or t/u
tatccatgtattgtactttgtatcattatgattgcatttaacttaattgcagatggcttgcgtgatgccttcgatcctaaaatgcgcgattaaaagagaggtgaggaaaaatggaaaagctattagaagttaaagatttaaatatttcattccacacatatgccggtgaagtaaaggcgattcgtggagttaattttgacttatataaaggggaaaccttagcgattgttggcgaatctggttctggtaaatcagtaacgacaaaatcgattatgcgtttacttccagaaggtaactcagaaattaaaagtggccaaattttatttaacggaatggatatcgctaaagctcacgaaaaacaaatgcaaaaaattcgtgggaaagatatagctatgattttccaagatccaatgacatcattaaatcctacgatgacaattggtaaacaaatttctgaaccacttattaagcaccaaaaaatcagtaaacatgaagcacataaaacagcacttcgtttacttcaattagttggtattgccaacgcagaagaaagaattaaacaatatcctcaccaattttcaggtgggatgcgtcaacgggttgttattgcgatttcacttgcatgtaacccacaaattcttattgcagatgagccaacaacagcgctagatgtaactatccaagcgcaaattttagatttaatgaaggatttacagaaaaaaattgatacgtcgattatctttattacccatgaccttggtgttgtagcaaacgttgcagaccgtgtagctgttatgtacggtggtaaaattgttgaaatcggaacagttgatgaaattttctataatccacaacatccttatacatggggactaattagctctatgcctactttggatacagatgatgaagaattatttgttattcctggtacgccacctgatttacttcatcctccaaaaggggacgcatttgctgcgcgtaataaatacgcaatgcaaattgaccttgaagaagagccaccactatttaaggtgtctgatacacattatgcggctacatggttgcttcatcctgatgcaccagaagtaacgccacctgatgctgtattacgtcgccaagagcagtttgcggaacttcatcctggcatgcaagctgtccatgcgaaaggggtagaagtagaatgactgaacaaagagaaaaattattagagattcataatctaaaacaatacttcaacaaaggtactgcaagtgaagtacgcgcggttgatgatatttcttttgatatttataaaggtgaaacacttggtttagtaggtgaatctggttgtggtaaatctacaactgggcgtactatcattcgtttatacgatgcaactggcggagaagttatttataacggtaaagatgtgcacgcacgtaaaagccgtaaagaaatgcttgaattccgtcgtaaaatgcaaatgattttccaagatccatacgcatctttaaatccgcgtatgaaagttaaagatatcattgctgaaggtattcgtattcatggccttgctaaaacacctgaagaaacgaataaacaagtatacgatttgttagaaacagttggattaagtaaagaacatgctggccgttatccacatgagttttccggcggtcaacgtcaacgtattggtatcgctcgtgcgcttgctgttcaaccagaattcattattgccgatgagcctatttccgcactagatgtatctatccaagcgcaagtagtaaacttattacgtcaattgcagaaagaaaaaaatctaacttacctattcattgcccacgatttatcaatggttaaatacattagtgatcgtattggcgtaatgtacttcggtaaattagtagagttagcgccagcaaatgatttgtatcatgcgccgctacacccttatacagaatcacttttatccgcgattccgttgccagatccaaattatgaacgtactcgtgtgcgtaaaacatatgacccaacgtctcataactataaagatggcgatgaaattaaaatgcgcgaaattgctcctggacattttgtttattgttcagaagaagaagaagttatgtataaagaaaagcatgctaagctaactgctgaagctgctgcgaaataataggaaaacatcaatcagagtaaaatttgattgatgttttttttacaaaattaaaattctcatgaaattctcataaaaaagctatttttttcatgtgattttagtttaaacaagttatagtaggggtatcatatacataacggcttgctaacaatggttttacatatttggaaagaaaatttttgaaaatagtatatggaatttcacaaaattagtgtataatga

SEQ ID NO: 3655 - DNA, 2789 bp, Listeria monocytogenes 4b
  misc_feature (1)..(end): n can be any nucleotide: a,g,c or t/u
tatcgtgttgtagaagcaaagttatctcaagaactaaatatgagtaggacaccaattaggcgagcgattatcaacctttgccattctggatttttagtccaccaatataatcggggtgcttttgttcaaaacactgaagtaactattacagaatttttttcgcgaatgaaattagtcgaactattgatgtatgaaagtacagaaaaattaattctacgtgaagattatattgtagtggacgatataatagaaatagcagagaaagtaattcaatatgaaaaaaacaaagaatatgaattaatgcgcgatacgtttgaagattttatcgtcgcatttataggtaagctaaataatgattattttaatagaataattcaagaattatggaatggaatcaatgataatgcaacaaaagaagtaagactaattattgtttcggcaagtgatcgaattgcggaagaattagctaatataattgaaattttaaaatcatggaattacggggaactaaaaaaatgttttcaacacataatgaacgcaatgattttgattgctttttaaagagaggtttttaaatattgaaaaaaataagctgggtgattatcatgctggttatcgttgctgcatcggttggctattattttataaaagaaaatgagcgaaagacgccacaaacaattgattacaaaacagttgaaacaaaaagaacagatttaagtgtatatgtttccgcagaaggtcacattgtaaaaaaagtaaatgaatggccagattatgaagattttgctgtcaaaattatggtagatgagctagaaattaaccaaataaaagaaaaacagacagctgatgtgtatgtcgaagcagtaaataataaagtatacaaaggaaaagttgtagatataaatgagnncncncnnnnntaaagcatatacggcagtacttttagccgtacgattgttttatagagtatgagccgaaagtaaaagaaaatatgtctgtaagtgctgatgtacttgtggctctagaaaaaaagattttaacaattccaatagaagctgttaatacggataaagctgataaacattatgtctatacagttgatgcaaataaacaaaagaagaaaatttggattgaagtaggcaaacataatacgaaatctattcaagtagtaaaaggtcttacagagaaacaacttgtgattattccatagacggaggtgagcaagacttgatacaactatttaatatttccaaatcctatcaaatgggtgaatgcaccataaaggctctagataatgtatcattgcaaattgatcaaggggaatttctggccattatcggaccgtctggctctggaaaatctactttaatgaacatcctcggtatacttgacagagcaacgataggagaatactacctcaataaaacgaatttaatgcgaatatcagataagaaaatttctcgaataaggaataggaaaattggttttatttttcaacaatttaatttaatgccacgacttactgcttttgaaaatgtagaattgccattagtatatcgaggtgtgggcaaagctactcgaaaaaaagtagtattaaaaagtttagaacgtgtcggactattagataaagaaaaacatataccagcccagctttcaggaggacagcagcaacggattgcaatagctcgagccatcgctggaagtccagaattaatattagcagatgaacctactggcgcgctagactctaaaactggagaagaagtaatgactttgctaagagaaattcatagagaaggaaatacattaatcatgattacccacgacaaagaaattgcaaatcaagcagaacgaataatagaaataaaagacggaaaactccgtgaatggaacaaattatgactcttttacagagtataaagttagcgctaaaacaattattgtccaccaaatttcgaacatttttaacaatgcttggaattattattggtgttttttctgttatattacttgtttcgattggggaagctatatcgaaaaatgtctccacacaattaggtgatatgggaagtaatcttttgactgttaatttttattcagataatccaaacgataaattcacatacaaagatgcaaaaaaacttttgaatgaagatgaaattggttcgccggaagtgatgcagacaaaggaagttagaacaagtgaaaagacagctagtaatcaagtagcgggaataaatgaatattatgcgagcataaaaaatttggaattagcatcaggccgtttttgctcgaatgtagatgttatctatgcccaaaaagtgacaattattggctcagaaattgcaaaaacttattttaaagaacagaatccgataggtgaatatttgcaaattgcaggtgctaggtacatggtcattggagttttaaaggaaaagggggagagtttatttggatcggcagacaaaaaactttttatcccaatttcttccgcagaacgactttttaaaacagatactgtggatttgtattatattcaaacaaaaaaagtagaacaagttccagcagcagttaaggtagtaaagaaaaaaatgcgccagttttttccgaataatgaagatgcgtatacggttgtaaaccagcaacaggcgttagatacgtttgatagtattacgggaacactcacgattggactaggtgcgattgcagggatttcgctactcgttggcggtattggtattatgaatattatgctcgtgtctgtctcagaacgaacccgagaaattgga

SEQ ID NO: 3656 - DNA, 3235 bp, Listeria monocytogenes 4b
  misc_feature (1)..(end): n can be any nucleotide: a,g,c or t/u
tgggacaacgattcgctttaagccagatccagcaatttttccaacgacttcatttaactatgaaaccttatcagaacgtctaagagaatcagcgttccttttaaaagggatgttaattgaattaattgatgaacgagttggcatggcagaggctttccactttgaagaaggtgtgaaaaactttgttgaatatattaatgaaggtaaagatgtgcttcatcctgtagctagctttgaaggggaaaatgcgaccattgaagtagaaatggcgttccaattcaatgatggttattctgaaaatatcttgagtttcgttaataacgttcgaactcgcggagcaggctcgcatgaatctggaatgaaagctgccatgacgcggattttcaacgactatgctcgtcgagtgaatcttttgaaagaaaaagataaaaatctcgaaggtagcgatattcgtgaaggtctttcagctgtactttctattcgtgtgccagaaaaaatccttcaattcgaaggtcaaacgaaagaaaaactagggacgcaggaagctcgtcaggcggttgatgcagttgtagcagaacatttagcttacttccttgccgaaaacccagaaacaagctctcttctagttaaaaaggctgttaaagcccgcgaagcaagagaagctgccagaaaagcgcgcgaagaaacacgtaacggcaagaaaaagaaacgttccgaaacacttctttctggaaagttaacgccggcacaatcgcgaaatcctaataaaaatgaactttacctagtcgaaggtgactcggcggggggatcagctaaacaaggtcgtgaccgtcgtttccaagcaattttgccacttcgaggaaaagtaatcaatacagaaaaagccaaactacaagatatcttaaaaaatgaagaaattagcacgattatccatacagtaggtgcaggcgttggtaccgaatttgatgtcgaggattgtaactatgacaaagtagttatcatgaccgatgccgataccgatggcgcgcacattcaagtattactattaacctttttctatcgttatatgcgcccactagtggaagcaggtaaagtatttattgctttacccccactttacaaagtaagccgtggttctggtaaaaaagaagtaatcgaatatgcttggacagatgaagaattagactctgccatccaaaaaattggtaaaggctacatgattcaacgatacaaaggtcttggtgagatgaatgctgaccaactttgggaaacaacgatgaatcctgatacgcgcacgttaattcgtgtacgggtagatgattctgcacgcgctgaacgccgcgtggccacactgatgggcgacaaagtagaaccaagacgacaatggattgaaaagcatgtcgagttttctatggaagatagccaaaatattttagaaaatgaaaacatgatggttgaggaggcgaaagacatttgagtaatccagaacaacatatccaagacttagcgctagaagaagttatgggcgaccgttttggtagatatagtaaatatattattcaagaacgtgcgcttccagatgttcgtgacggactgaaacctgtacaacgtcgtattttattcgcgatgaatgtcgaaggaaatactgctgagaaaggtttccgtaaatctgctaaaacggtcggaaacgttatcggtaactaccatccacatggtgactcttcagtttacgaagcaatggtacggatgagtcaagactggaaagtacgtaatatgctgattgaaatgcatggtaataacggtagtgtcgacggggatccgcctgcagcaatgcgttatacagaagctcgcctttctcctatatcagcagaacttttacgcgatattgaaaaggaaacagttgactttattcctaactttgatgatacatctagtgagccaactgttttaccagcacgttttccaaaccttttagtgaatggttctaccggtatctccgctggttatgcaacagatattccgccgcataatttaacagagatcatcgaagctgttattaaacgattagataacccactttccacaacggatgatattatgaaaattgtcaaaggtccagatttcccaacaggtgggattattcaagggattgatggtattcgaaaagcttaccaaactggaaaaggacgcgttgtcgttcgttctaaaacagaaattgaagatattcgtggcggtagaaaacaaattacaattcatgaaattccatatgaagtaaataaagctaatttagttaaacgcatggatgaacttcgaattgagaaaaaaattgaaggtatttcagaagtacgtgatgaaaccgaccgcacaggacttcgtattgctgttgaactaaaaaaagatgccaatgctgaaggtgttttgaactacctgtttaaaaatacagatttacaagtaagctataattttaacatggttgctatcaataaaaaacgtccggagctaatgggcattatcccaatgcttgacgcttatattgaacaccaaaaagaaattattacgaagcgctctgaatacgatattcgtaaagcgcgcgctcgccaacatattttagaaggtttaattaaagctttgtctattttagatgaagtcattaaattaattcgtggttcaaaagacaaacgcgatgcaaaactaaatcttcaaacaaaatatgatttcagcgaaaaacaagcagaagcaattgtatctttacaactttatcgtttaacaaatacagatatacatgaacttcaaagtgaagcaaaatccttagcagaacaaattagtgttcttgaaaaaatcctaggtgatgaagcagagcttatcgctgtgttaaaagaagagctagcggaaattaagaaaaaatataaaactgctcgccgtacagaagtgcaagcagaaattacagaaatcaaaatcgatacagaagtacttgttgcgaatgaagatgtgattgtttctgtgacaaaagaaggctatgtgaaacgtacgagccaacgttcttatgcagcatcaaacggtgcggaactagccatgaaagaagcagaccatgccgtctttatccaaaaaatgaattcacttgattcgctcctgttattcacgagcaaagggaattgcatttatcgaccagtacatgagttgccagatattcgctggaaaaacctcggagatcacgtaagtcacttggccagtgatt

SEQ ID NO: 3657 - DNA, 2939 bp, Listeria monocytogenes 4b
  misc_feature (1)..(end): n can be any nucleotide: a,g,c or t/u
gtgattgatgctgattcactggctcgtttgacggaagaagctaaatcacagaatgtagaggtttgctattataatgataaaagaattggcgcaaccgcaagtacacctgttgtaaaagcacactatgattttttaggcgagccaatgccagaagtaaggcctaatatgtataaagaagaaaacatcaatatggcgcttcttttactcgaaactggtgatgattattttccagaacgctttccagaattacaatttattcgcaacacaccatttagtaatgacgtcttaagaaatggcggatctaaagcagtaggcatttcgaagctacttgaagtaatgggctatcaagacgttccaacttatgcgtttggtgatggaatgaacgatttagaaatgtttggcgcagtggattatgccattgcaatggaaaatgccgtaccattattaaaagaaaaagctacttttgtaacgaaagataacaatagtgacggcattatgcttggcttgaaacaatttgatttaatttaaagaagtgcctcgtgcgcttctttttttgtgaaattccaacgcaagaccgatagaattgtaataattcttttgatataataaaactaatcaattggaagaggagaaatgttaatgaacgaaatcaatcacacatccgagcgagcaaacacagaaaagagaactgagaaacaaattattatgcaaaaaatacttaattggtttgtattttctttgctacttgcatctatcggtgctgcgattgggagtaaattaagtccagaactttatttgcctcttgtcgtcttagaagtcgcgttacttatcacagcgatggtagtgcgtcgaagtaaaactattaataaagtggtaggatacccagtagtactagcatttgcgtttgtcacaggcttaacgcttggaccaactttgacatattattttggtgcagggcaaggtgccgccgttctaatggcatttgttacagcaaccgttactttcacaacgctagcttttattggcgcaaaaatgaagaaagacttatctttcttaagcagtgctttattcgctgcgattattattctcgttatatttagctttgtaggagtctttttaccattaggttctatgctatcaacaattatttcagcaggcggaacgattattttctcactatatattttgtatgacttcaaccaaatcatgaagcgcgatgtggaattagcagatgtaccaatgcttgcgctgaatttataccttgatttccttaacttattcatgttcttactccgcctatttacaggtcgtgattaagaaattcagaagatctgccaacctaaaaattggtagatctttttctataaaaaagatggtttttgttagacaaaagcaagataaaaaactataataaagttaaggtcaaaaaaggtcagacttatcttttataaggaggacgaatgaatggatttacaaaaatttacgcaacaagtccagcaaacaattgcggacgctcaaaatttagcaattgcatccgaacatcaagaaatcgacgtcgctcatgtttttaaagtgttattaacagagagtgattttgccaaacgtgtatatgatgtagcagaagtagatatagatgcacttcaaaaaacagtagaagatgctttaacaaaaattcctgtggtctctggaagcggtgtaaactatggtcaagcaatgagccaagcactttttcagttgatgcgggatgccgaaaaagaacaaaaacaattagacgatgattttgtatcaacagaacatctaatcttagctgtcatggatcaaaaatcaaatccaataacaatgaatctaaaaaaacaacataaatctaaaaaacaaattcaagaagctattttaaaaatcagaggagggaaaaaagtgacttctcaaaatgcagaagaaaactatgaagccttaacaaaatatggacgtgatttagtcgcggaagttagaagtggtaaactcgatccagtaatcggacgcgatgcagaaattcgtaacgttatccgaattttatctagaaaaacaaaaaataatccagttctgataggtgaaccaggcgttggtaaaacagccattgtcgaaggtttagcacaacgaatcgttcgaaaagacgttccagaagggctgaaagataaaacgattatctcgcttgatatcggttcccttattgctggagctaaatatcgcggtgaatttgaagaacgtttgaaagcagtacttcaagaagtgaaacaaagtgacggtcaaattttactatttattgatgaaattcatacgattgtcggcgcaggtaaaacagatggcgcaatggacgccggaaatatgttaaaaccgatgcttgcccgcggtgaactacactgtatcggcgcaactacgttagatgaataccgccaatatattgaaaaagatgccgcactcgaaagacgtttccaaaaagtacttgtcccagaaccaacagtggaagatacagtatccattttacgtgggttaaaagaacgctttgaaattcatcatggggtaaatattcatgataatgctttagttgcagcagcgagtctttctaatcgttatattacggaccgcttcttaccagataaagcaatcgacttagtagatgaagcatgcgcaactattcgtgtcgaaattgactcgatgccaagtgaactcgacgaagtaacgagaaaagtaatgcaattagaaattgaggaagcggctttaaaagaagaaaaagatccagcgagtgaacgccgtttagaaatattgcaacgcgaactagctgactacaaagaagaagccaatcaaatgaaatcgaaatgggaatctgagaaaaacgaaattagtaaaattcgtgaggtccgagaacaaatcgatcatttgcgtcatgaattagaagaagcaga

SEQ ID NO: 3658 - DNA, 3128 bp, Listeria monocytogenes 4b
  misc_feature (1)..(end): n can be any nucleotide: a,g,c or t/u
actgaaggcaacctattcgatgccctgagcggcgccactgtgctcggaaagaatgaagaaaaatgtgcgggggtttgatgatgaaatatccgataatgcttgatattacagggaaacgggttgtcataattggcggtgggaaggtggcgcttcgtaaagtaaaggggctgcttcacaccggagctgatattttaattgtcgggttagacgttttgccagagattaaagagcttcaagtgcaggtgaaagaagaagcataccgggcagaacatctaattggtgcttttctgatatttatttgtacgaataacccagaagtaaatcaaatggtactgaaagatcgcttgccagaacaactagtgaatgatacgactgaacaaaagaattccgattttttcaatatggcaactgtatcaaaaaatgagttgctagttggtatttcaacaggaggcgggaatcctggatacgccaagaaagtaaaacgggaagtacgccagttagtagaaaatttagaaacagaagaaatcggaaggcgtaataaaaatgataaaacctgctaattttagtaggttttttattctattatattgctctcttttaggttgcaaaattttactatagattttggaatgtaaacgctctatcattgaagtatactgaaaaactattaagagggtgttgagccaaatgtccattttagaaaagattaaagatgccggagttgttggttgtggtggagcgggctttccgacccatgccaaatttagcggtgaagtggaatacttaattattaacgcagcggaatgtgaaccgctcctaaaaacagatcattttgtcatgagaaaccatgcagtagaaacgattaaagcaattgaaatggttaaaagccaagtaggtgcagaatttgccgttattgcaacaaaacggtattacacagaggaaattgcggctttacggtcagcaattacagaactagatgcaagtgtgacaatacatgagatggataatgtctatccgactggtgatgagcaagtcatggtctttgaagtgactggacgcgttgtgccaccaagcggtattccactaatggttggctgtattgtatcgaatgtctcgacaatgtggaacgtctttcatgcaattcaagatgacgcaccagttgttcgtaaacagctgacagtaactggagcagttggagagccgaaacttttagatgtcccagttggaacgccatttgaagtctgtttagcagcagctggtggaactaatttagacgagtatttatttttagatggtggaccaatgatggggaaattaaatgacaagtctaccattgctgaaaaagtagtaacgaaaacaacttcgggtttgattgtggcagaggatactggttatctgcacaagctacattaccaaacagtggaacaaatttttaatgaaacaaaatcggcttgtattcagtgttcactttgttcggatttatgtccaagaaaacaattaggtcacgatattcatccgcataaagttatgcgccatttcgcggttgcagaagatataacggatattaaaccagatccgatttgggaagaagcgatgatttgctgtgaatgtggcatttgtgaggtaattgcttgtccgatggggctctcaccgcgccaagtaaatattcatgtgaaaaaagaacttttaaaacaaggcgttcgttatcaaactgataaaaaagaatttacgcctgatccgatgcgtgaatataaatcaattgctcccaaaaatattctaatcaaaatgggcttacaacaatatgcagacgttcatttagaaacaatgcattatctagatgtagatgaagtatttatcccaacgaaaatgcatattggcgcgccgtctattccagtagtaagtgaagcggacatcgtgaaaaaaggtgatttaatagtaaaaattcatgataatgctgttgggacaaatatccatgctaagtattgacggtcgaattattcgtatatccagaagaacaagttcatattaataaggtgatgtcatgaaaatggatacattaggatttctcgaattaaatagtatttcgaaaggcatcgaggcggttgacacaatgctaaaagcggccaactccgaattgatttatgctaaagcaagctgccctgggaagtattatatattaattgcagggacagtagattctgtagctcaatcaattgaagctggaacgaagattggtgcggcaaatatcgtcgggaatttagtcattcctcgcgtgtccgaccaagtaattaaagcaattaacaaaacggaagtgccagatgagatgaatgcagttggtgttatggagtattattcctgttcaggatcaattattgctgcagatgccgcagtaaaagctgcagatgttcagttaatggatattcggttggcaacggggattgctggtaaatctttcgttgttctaactggtgatacagcagcatgtgaagcggctgtggaagctggacttgcggcagccaaagaagaagcacttttaattaataaagtagttataccaagacctcgtaaagaagtttttgagagtttaatctattaaaaagataacaatatattgtcatagagtttttgagaaaggtacgcactgactgtggttgcgtgccttttgaacaatctgacaaaatagtggcgcttaaatatgataggattattttgagatagtttgtctagatgaggagtgaagaaaatgagttttgatgataataaagagcgtgtaatacaagaatatgtaccgggaaaacaggtgacgctggcgcatttaatcgccaacccaaaccgtgatatttatacaaaattaggattagaagaaggcgcaagtgcgattggaattttaacgattacgccaagtgaggcttccattattgcgagtgacattgcaactaaatcaggtgacgtacgaattggctttattgatcgttttagtgggtccgttgtacttacaggtgatgtttcttctgttgaatcagctttacaacaagtcgtttattcattacatgagattttggacttttctattccaaaaatcactaggagctgagtcacttgaagaaaatgatggtaatgggttcagt

SEQ ID NO: 3659 - DNA, 3666 bp, Listeria monocytogenes 4b
  misc_feature (1)..(end): n can be any nucleotide: a,g,c or t/u
ataatttctattccggacctgggttcataagcaaactcaccaggtgatttttgccacaaacaggagaggtgtctaccaataatgagtagatcgcccagcagggtagaaggaaggacgttgactaatagccaaaatttcacctgttttcggatcagctacaactgccatcatgtttttaggtttgtactttgcatccacagttgtcatcgtatcttctaaaaaggtttgaatttttttatctagcgttagcgtaatatctttgccgtcttttgcttccgttactttgtttttagagttaggcaaaatatagcccattctgtctgtactgtaatcaattttgccattcttgcctgtcaaaatatcattgtaacgggattcaatacccattttaccttctaaaactgtagtattcttttcttcttcttgttgggcgaaaccaattaattgtgttgcaaacgttccattaggatagaaacgttctgattgacgagtaaattcaatacctggtaaattttctttgtcaatttttgcttttgtttctgtagaaatatttttaccggcagcgccgaattcgacttggtattttcctttttcattgagtttatctagaatatcagattcatccataggaatatacttggcaagaattcgagccgttttttcttcgtcaacaacacgcattggatttttcgttgttttggaaagtttatcgctaactactgctgcaaccgtgtaagaagcctgttcctccgctagcacttctcctttacgatctaaaatggagccacgctttgcttcgagaacactgcttttcaaatgttgtttagatgcttttgctgcaagaggtaccccatttgcttctcccgtaatttgcaaataaagaaaacggccagaaaccaagagaaagagaattgtgaaaaagataaaaagcacaagagctccccttctcatgttacctatacgccgtttcattgaccatctaccactttcacattatcgccatcaagttttagccctttttctttagcgattttcaaaatacgttcatatctccctaaatcttttacttctacttttaagtcttcatttgatttttgttgttcgagaattttggtttcttttgtttgaatttcttggttcactgtgtaaatttgcgcttgtacgctaattatacgaaaagcaacaactaaaacaatcgcaagcgcaatcgtgatgattactttttctccaagtgtcatttgaccacgttttaggatttgttttttaggttgttccgcttctctatgtactctatttggctcgagattcgatttataggcgacattgctcacattttttcaactcctgctatttgataattttttcgatcacacgtaattttgctgaacgcgctcggttattttgttccagttcttcttcacttggtacgattggttttcttgtcgcaagtttgaaatctggtttatattcatctggaatgacaggaagacctggtggtaaatctggtccttttgtcgcttcttggaataagtgttttgtaatgcggtcttctaaagaatgaaacgtaattacgctaattctaccgcctggttttaataaagttaaggctttttcaagcgaatcttctactgcaccgagttcgtcgttaacggcaattcggatggcttgaaaagtgcgtttccctggatgtccgccttttcttcttgctggagccgggatagctgttttgataatatctactagttcgcctgttgtttcaattggctttacttcacgacgacgttcgatttcacgagcaatttgtttcgaaaatttttcttcgccatattggaaaaagatacggattaaatcttgataagaccattcgttaacaactatttttgctgtcaattcttgttcttgatccattcgcatatccagtgcagcgtcttggtgataactaaaaccacgttctctctcgtctagttgtggggatgaaacgcctaaatcatacaaaatcccatcaaccgcttcgataccacgctcatttaatgcttctttcatatcgcgaaaattggctttaataaaagtcactttatcgctataatctgctagtttaatttttgcattatcaattgctgtttgatcttggtcaaatgcaaataaatgccctttttcattaagcttatttagtaaatactcggagtgacctgcgccgccaagtgttgcatcgacatagattccgtctggttttacttcaagcatatcgactgtttcatgtagtaatacggtttcgtgtttaaacatgcgtttacccccttaaatatcaaagccaatcatattttcggctaaatcagcaaaagattcttctgcctcgttaaagacatcatcccactctgatttactccaaatttcaatacgactagaaaccccgataataactgtttctttttccaaatccgcatactgtagtaagttggatggaatattaatccggccttgtttgtctagttcacattcagacgcaccggaaaagaagaaacgtgtaaaggaacgagcatctttcttagtaagtggtaaggtttggagcttttcttcaagctttttccattcctcttgtggataagcaaataaacacttatcaagtcctcgggttataacaaaattatcccccaaaagctcacggaatttagctggcacaattaatctgccctttatatcgatgttgtgttgatattctcccatgaacattagacttcacccactttcatacataccactttaccacatctccccacttcgcaccaccaaaaacctaaaaaagtgtaaaaaaaaatcatcccagccaaagcatagaatgatcaatcccttatttaaagccatttccatctaattcaattcttaaaaaacaatgtggggcttggtggagggattccccactttgaaccaacatttattttaccaacactttttcccaaccagattttagtgccactgctgagaacactatacttaaaacaccaagcgtaatcgtaaaagctcccatgccatatttaccaataaatggtgcaaatactaaacttacagaaccaatcattttaccaatttggaaaataataccattaaatgccatgtaggccccacgtctttcatcatctacaattgccgctaagatcgtttgacgtgttggtacatagagtaattcaccaattgagagcaccatcgtcgccaaaagtaaaactgttagattatttgcgaaagcacaaactgcaaatccaagcgcaaacaaagtaaaccctacatacataataggttgctgcgcccttttagtcacaaatctcgcaattggtacggtaaaaagtacaataaataaagtattcacagcggttaacacactcactatttgtactccattgagagaaatatttccaagtggccccaaatgtacaagtagcgctttcacatcttctgctaaacgaaccgaaatgtagttgtccgttgaactcatcgactgaagcattccccatagtttagagaacatatatgatctgtctatttagcatcatatctaacttgcgtcttgtacgtgatactaactctattaaacaattcccgcnttnnccttntaagacttattgagcgcgatgtgtttttttttgctacatcgctgcaacataatcaagaaaa

SEQ ID NO: 3660 - DNA, 3175 bp, Listeria monocytogenes 4b
  misc_feature (1)..(end): n can be any nucleotide: a,g,c or t/u
ccgtaaggcactctacatgctgcttgagagggcgacactgtggctggaaagaagataccgcaacaaagtctaattttcctgatgataaaaaaacaacgaatgaaaatccgaaacaagtgcaagatagttccagcttggcaagatttattaataaaaacgtaagtgaattaaagaaagagtttggggacccggtgcgtgtagacaaaacagcatacggttacgataattacatttatagtcgaccaggaacaagctatatgcaagtaggtgtaacaaaaaatatcgtgcaaaccatttatgcgctaggacaagatttaaatgtcatgccatatacaattggtatgtccactgagaaagtatttaccgatgccaacttacaatcggaaatatccttcaactataaagacagctattataaattcgaactttctgaagaagacttaaatgcccgtccaatcgttaatattggaagtggcgtttatgcgcaactgaatttcgataaatttaagtcaaaactgattagtgttcgttacctcaataaattatccttcgtcaaaatgcgcccctatgaattatcttaccaaggtgaaatttatgaagaaaagttgacgccagcagattggaatgcaattgatgatgcttctagtaaacaagtgctagaaatcactaatgttattcgtgatcgatacggaatagaagaagtagcttgggacgagtctgttgcgaaagttgcatatggacatagtgttgatatgaagaaaaatgattattttgaccatacttcaccgacacaaggagatctaagcaaacgacttagtaaaggggatgtcaaatatactaaagctggtgaaaatatcgcctataactatgtcgatagtgcagcagcagtagaaggttggctcaactctaaaggacatagagaaaatctactagatggttcatatacctatatgggtgcgggaacatatcgaaaatactatacgcaaaattttattattaaataatagttctatggtataataaaaaagtaagttatatggaggtggctagattgctcgctacaatggaaaatatggcgctactcgatttatcagatgagcttgctagcatgattctaaactccgaggaagcgcaaaattataaacttgctaaggaagcgttgctaaatgacgctacttcacaaaaaaatattcgtcaattcatacgaataaaagaacaatacgaggaagtgcagcggttcggccggtatcatcctgactataaagaagtaaccagaaagactcgtgcttataaacgcgaagtcgatatggatcaaaatgtggcagcttttcgccgggcagagatggatttacaatctctcttggacgaaatcagcctgcttctcgcaagtgcagtttcagagaatatcaaagtaccaactggtaatccgttttttgaaacaaaatctgcttgttctacaggtggatgtggcagcgggggaggctgcggttgttcagcgtaaagcttatcctaaaaagaaggggcttaaacaatggaaaatgatagacaagctatcgtcgtttggatgaatcatcttaaacaagttagatctttgaagcgatttggaaatgtgcattatgtatcgcgcaagttgaaatatgcggtattatattgtgatatggctgaagtagaagatatctctaacaaagtttctcgttttcattatgtgaaacgcgtggaaatgtctttccgtccgttcttaaaaacagaatacgaatccaaaaaagaaatgatgtacgaacacaaaaacgaagatgtgcaaatcagtatctaaccaaaacggcaagactatctcaactagtcttgctgtttttttgcttctatttgtgataaagtaaaaaagacattgaagtaaaggttgtgcaaaaacatgagagtcattgcaggagaacgaaaaggacacgctctaaaagctgttccaggaaacaatacgagaccaacaacagataaagtaaaagaatccttattttcgattattggtcccttttttgacggggatatggtgcttgatttatttgctggcagtggtgggcttggaatcgaagcgttgagtagaggtgccgaacgagctgtttttattgaccaagcagcgctcgcaattaaaacaatccgccaaaacttagaaggatgccattttacagagcgtgcggaagtataccgaaatgatgccgaacgagcactcaaattactccataaaaatgagtggaaattcgaccttgttttcttagatccaccatataaaaagcaacaattagaaaaattactagtaactttagaaaaattagaattagttaacgaaaatggaagaattatttgcgagcatgacaaagaagcaatcatgccagatacaatcggtaaattcgagaaaatcaaatcagtttcttatggaattactgttttatctatatttgaatttcaggaggcgtagaaatgggtgacaaaattgccgttattcccgggacatttgatccgattacgaatgggcacttagacattattgaacgggcagcgaagatttttgatgtgctgtatgtttccgttttaaacaactcatccaaaaaaccacttttcacgatagaagagcggatggaaatgattagacaagtaaccgcacatttgccaaatgttcaagtggaaagtgcgagcggattgactgttgattatgctgctacgcgcggggctactgcaattgtcagagggcttcgagcggtgagtgattttgaatacgagatgcaaattgcttcgatgaaccgaacgctcaatgcggaaatcgaaacatttttcattatgactaatacgaaatattcttttttaagttccagtatggtaaaagaagtggcgcagtatcaaggtgatatcagcgaacttgttcctgaaatagtgaacgaacaagtacaagcaaaatttaagtaagtgggagatggacagaaaatgcgtaaagagtggaaaaaaataacggcgatagtgctgttaattattattatagcgggcttttttattccagttccgtattatatttcaaaacctggtggtacggaagaacttgctccactcgttacagttgatgaccatccaaataaaaaagacggttcgctcagtctagtgacgattgcaatgggaaaagagaatatttata

SEQ ID NO: 3661 - DNA, 2753 bp, Listeria monocytogenes 4b
  misc_feature (1)..(end): n can be any nucleotide: a,g,c or t/u
cgcggcagcgcatccagtaaataaacaagtagtagctctcaaagcacgcaaactcaatcagtcaattacatcgtttggtgaacttccaaatcaaatcgcagcatcattcaatgacatccaagttttcgcacttgttgacggtaaaaaccttacaaaaatgggagatattactagctcaggcattatcgcacagatggttaataacgtaactgttggcggtggcgatgtatcagcggacttaaaagctgcacagaaaaaagctgaagaaggtaaataatcaaatagcggggagttgagtctccccgtcttttttaacagtttagtacgtcgctttttgatttaaggaggcattatgaaaacgaaagtatataaaaggtccgactttaagttagcaatgattttacttgcgccaagttttgttttactggcagcacttgttttatatccgatgatttcaaatatccagattagttttttagatatgccactaaatccgaatattaaatcagtctttatcggtttacaaaactatatagatattttgaaggatccagagttttataaatcactaggtcttactgtggcttatacagtacttgtagtggttggaagtactgggatgggactacttgtggcgattttctttaaccgcgaatttcgttttagaagaacggctcggtcgcttattattttgtcatatgtaacaccatctatttctcttatttttgcatggaaatatatgtttaataatggttatggcgtaattaattttatgactgtggatgtactccatctgttcaaagaagcgccactttggtttgataatccagtttctagtttctttttagtaaccttttttgcaatatggcgttacttcccgtatgcatttatttcgtttttagcgattttgcaaacggtcgataagtcgctttatgaggcggctgatatggacggagcgaacatttgggataaattcaaaattgttactttgccagcgattatgccggtacttgcaacagttattacgcttcgtgcgatttggatgttctatatgttcaccgatgtatacttactcacgaataaagtaaacatccttggagtttatttatataaaacagcattcgcattcaatgatttagggaaagcagcagcgatttctgtcatattatttgtcattatttttgttgtgattatttttgcaagaaagcgggtggatttgaatggcggtaagtagtaaaaagtcaaaaagaacaaagaaaatcgcgttttatgtgacgatggttgcatttttatgtatcacgttgttcccatttgcgattatgttaatgacttcatttaagagcagtaaagaagccatttcaacacatccaacatttttcccgaaagaattcactttccagcattacatcgatattttcaacccagatatttttccgtttttaacgtactttaaaaatagtttggttgtttcggtttttgcggccgggattgcagttgttttggggattttaggggcttatgcgttgtcgaaattacgctttaaagggcggatgacgattaatgcaagtttttatacggtttacatgttctccggaatcttgttaattgttccgttgttcaaaataatttcgagtttggggttgtatgatacggaaacagctttaattatcacaatggttgtacaaacactaccaactgcggtatttatgctgaaaagttattttgatacgattccaactgatattgaagaagctgcaatgatggacgggctgaatcgtttccagattattttacgaattatcgttccacttgcgatttcgggtattgtttctgtgttcgtatattgcttcatggtggcttggaatgattatctgtttgcttcgattttcctatctagctcagagaaattcacgttaccgattggcttgaatacactatttagtacaccagattatatttggggtagaatgatggctgcatcgcttgttacggcgcttccagtcgttattatgtacgcaatttcagaacgatttatcaaaggaaacttaacagacggtggagttaagggataagaaaggaagttattgaaaatgaaaaaattagtagcgacagcgcctcgtgtggcggaattaatagaatataatgatcgtgaagttttagaagatgaagtgaaaattaaagttcaattcgcttctccaaaacatggtacagaagtagttgattttagaggaattagtccttttattgatgaagaattttcaccagaaaggaatttatttgtttcacgtgaaacaaatagtgcgcgaggcattgtatttggcgagtttcagctaggtaacatggtcgttggtgaagtagttgaatgtgggagcaaagtaacagaatacgagcttggagatattgtttgttcttacggaccgattatggaaactgttattgtaaaagctgtcgataattataaactacgtaaattgccaaaaggtgctaattggaaaaacgcggtttgctatgacccggctcaatttgcgatgagtggcgtgcgtgatgcacatgttcgtgcgggcgattatgttgttgttgtcggacttggtgcgattggtcaaattgcgattcaactggcgaaaaaagctggagcaagtgttgttatcggggtggatccacttagtcatcgtcgtgaaattgctgaaaaacatggagcagatgctacttttgatccaattacgacagatgttggcttagaagtgaagcgtctt

SEQ ID NO: 3662 - DNA, 2583 bp, Listeria monocytogenes 4b
  misc_feature (1)..(end): n can be any nucleotide: a,g,c or t/u
gcgctggaaagtggggttgctgatggaatgtcagaaatcaggggtggcgaaacgagatacaccattaaattaaagaaaaatgcgaaatggtccgatggttctcaagtaaccgctgatgatttcgtctacgcgtggcgccgtgtcgttgatccaaaaaccgcacctggatactccgcgctcttcaaagattcgattaaaaacgccactgaaatcaatgaaggcaaactacctgtaactgaccttggtgtcgttgctactgacccaacaacgcttgaaatcacactaaaaaaaccagttccctacttcatttcacttctttcttttgaaacatttttcccacaaaaagaaagctttgtgaaaaaacaaggcgacaaatacgggacagatagtgcgcacactttgtacaatggtccttttgttatgaaggattggggcggcaacattacgaataaatggacttacgcgaaaaacgaccaatattgggacaaagataatgtcaaagtaaatgaaattgatgtgcaagtcgcgaaagatattaacgccggcgtgaacctttataatacaaacgaagctgaccgcgtgccactttcaggcgattttgcgaaacaatacaaagacaagaaagatttccaaacggaaaaagatgcgctgattagttatttgcgcatgaatcaaaaacgcgacggtaaagcgactccacttgcgaataattccttgcgtcacgcgcttaatttagctgtcgataagaaacaactaacggatcggattctcggtgacggttccttcccagcgaacggacttcttccaaaagatttcgtccaaaacccaacaacgggcgctgatttccgcacagatagcggcgaccatttagtttataacaaagaagaagctttaaaatattggaaacaagcacaaaaagaacttggcactgacaaagtaacaattgaacttctcggcgatgaccaagaaacaacgaaaaccattttcgcttatttgaaagcacagtttgaagataatttgccaggtgtgacgattaaagtgaaaaatatgccttcgaagagcgcgacacagctaacttctgatggtaattatgacttgtcactggctgcttggatgcctgactttaaagatccctggacgtatagcagtttattcttatccgattactttaataaccatatgagttacaacagtcctgcttatgataaacttgtaaaatcgactgatacaacacttgcgacgaaaccagaagaacgttggaatgcattcgtagcttctgagaaagttctgcttgatgacgacgcggcgatcttaccactttatcaacatcaaacagcagtgttgcaacgtacggatattaccggcgtgcagaaacatgcttttggttcgccttatagttataagtttattcgggtggagaagtaattcgccagtttggaaaaagccagcaattttaaaaattgctggctttttgatttataaattattaaattctatctttgcaagtaagcgtttatcttatttactaacgacaccaatcagataaatgaacttaatttatatattaaaaagtatcgcaaatataacaataggctggaacatataggattctgaaaagcctcaagtgttccaacctattatttaatcattaatatttaacggaatttcttctttcttattttcggataagtcgtggtatgccttttattcttattcgtattcaatatagattttactaaatcgattattttcaaaaaatgaaataattgttttaactacttcctctaaatcatctttcattgaagtctgattgattttgctaatatcaaaacattttaattgagtaatggtaagagagttatcttcaatcatccacggtgaatcatcataccatccctcatgattaaagaattctttcagaactccctctctttctacattacaatctaataagttatctaaaatagtctcaaaataaccgttccaaattacaagtttattatcaccagcaacgaaggaaatctctgcttctccttcaaaaccttcataaaacctactattaatcatttagttcattccttccaatgacctttatctaaaatttttatttgttctggagtagcatttcctgcttttcttgcgtttatagcatcataccatttatatccttctacccactcatcatcaccaattttgaagaatgtttgtggcttgtcccctccatttccaggaactgttctttggacaacccatgtattcccctgctctaaaggtgcttctggagttcttgtatgccatcgcacttcatacttaaattgaccatcattccatttataagtaatttgttcatagccagctttttttgtctgggcttttattttagcgttatctggaattgcgattggtgcttttttcttgtatttatttgctagtttcaattgttccttttcggataaagtagatagtttgggtgctttcgaacgcctattcttaatattgtttaataattttttaggaatcttcaatttttttcctttatacccaccagaagtgtagtaaaagataaagccacttataatacta

SEQ ID NO: 3663 - DNA, 2926 bp, Listeria monocytogenes 4b
  misc_feature (1)..(end): n can be any nucleotide: a,g,c or t/u
gctacggctcctacagcagctcgagcgccgacgtgtgctggaaagagggggcgcagtatttaaataatatagatacatcaattttaaataataataaaataacggatttaaattcacttgcaggactatctaaattaaggatattagaagcaaatgacaatcaattaagcgatataagtgcactagcaaatgtgacaagtctgcaccaattaagattagctggaaatcaaataaaacagttaaatggagttagtaatttaatcaatctagaaaccatagaactaagcaacaatcaaataacggatataagcccagtttcaggtttgaaaaacttaattggtcttggaatagattataatgatatcagtgatttaagcccaattgctggcttagcaaagttaagtcatttaactgcagacaataaccaaataagtgatttgagtcctatttcaagcttaggggctatggaaattatgcgactagataaaaatcaaatcagtgatgtaaccccaattgcgaatttggctaatttaagctatgtatttttagctgaaaatcaaatcagtgatattagttctttacaaccactttttaattcacctaatttttttggtattactttagacaatcaaaaaataacgagtgaaccagtattgtaccaacaagagcttgtggtccctaataacattaaggatgaaatgggagcgttaatctcaccagatacaattagcgataatggtgtttatgcaagcccgaatattaagtggaacttggctaattatactaaccaagtaagttacacatttaataaacaattagcacagggttcttttagcggaacagtgacccaaccacttcacaatgcttatacagcgacatttgacgtagatggagtgaaaacaaatgaagtagtggaagaaacgaaattgcttcaagaaccaacagctccaacgaaagaaggatacactttcacaggctggtatgatgcgaaaactggcgggaataaatgggattttgcgacagacaaaatgccagcagaagacatcacattatacgcgcagttcacgattaatagctatacagccacattcgacatcgatgggaaattaacgacgcaaaaagtcacttatcaaagcttgctagaagaaccagcagcgccaacgaaggatggctatacgttcaaaggttggtatgatgctaaaacaggtggaactaaatgggattttgcgacaggaaaaatgccggcgggaaatataacgctatacgcccagtttactaaaaatgccaccccagattccaatgacccaacaacggttaccccaacaggaaatggcaatgggacaagtaccccaagcaattcaggtggaaataccacgcttccgacagctggggacgaaaataccatgcttccaatttttgtaggagttttcttgttaggaacagcaacgcttattctccgcaaaacaatcaaagtaaaataacaacaaaaaaacagctgaggtctatagtttttctatagatttcggctgtttttttattagcaaagaaattcatctaaacgtcacaactaaaacggtaacaagtctaattttagtgattgaatgaaaacctactacgctataatatagtaactcaactacgagaacatacaaatttctaaaagcagaacgatcatacaaaggagatagtttaatgaaaagaaacaaagtaatattaagaatcgtagtgactttagcagcagtattggcaattactttttgggttgggatgagctcaaaagaagtacaagcagcggtaattgaacaaccaacccctatcaatgaaatttttactgatccagtggttgctgataatgtgaaaacacttctcgaaaaagcggatgtaacagatgaagttacgcaaactgatttagatagtataactcaattatcagcaaaatctgcgggaataacaacgatagaaggaatgcagtacttaactaatttatcagaactagaactaacagataaccaaataaccgatgtaagtccgctcgcaaatttaacgaaaataacagagcttggattatccggaaatccattaaaagatgtaagtgcgcttgcgggattaaaaagtctaaaaatgttgcatcttatttatacagatattaccgatgtgacttcccttgcaggtcttaccaatttgcaggaattaaatttggatatcaatcaaataacggatataagtccactagcagctttatctaacttgcaaacattatcactcggatatacccaagtgagcgatttaaccccaattgctaatttatctaaactaaccatattaaacgctgaaaattgtaaagtaagcgatatctcgccacttgctagtttatctagtcttacagaagtttacttgagagagaatcaaattagcgatgtgagtccccttgcgaatattcccaacttatctattattgagttgacggatcaaataattaccaaccaacccgtatattatcaaaataaaatcattgttccaaatgtgataaaaggcctttctggtgagcttattgcacctgatactattagtgacaatggaacatatactagtcctgatttaacgtgggatttaaacagctacattaatagtgttagttacacatttaaccaatcagtcgttttcaaaaatgcaacagttcctttcagtggaacagtcacccaaccattaacagaggcttacactgccgtttttgatgtggacggagagcaaacaagtttgacagtagttgtgaatgaattaattgaagaaccaacagttccaaccaaggaaggatatacattcgatggctggtatgacgcagaaacgaatgggaataaatgggactttgcggtagataaaatgcctgctagtgatataactttatatgctaagttcaaagagaacg

SEQ ID NO: 3664 - DNA, 4943 bp, Listeria monocytogenes 4b
  misc_feature (1)..(end): n can be any nucleotide: a,g,c or t/u
ggcggcgaaacggggggatgcctgatatgtacggcgcggaagattatgatttagctggttttactgttggggctgtngagaaacagaagctaattacagaaggcgcagtcaaagaaggagatacactcattggtattccatcaagcggaattcatagtaatggttactcccttgtgcgtaaaattttctttaaagataacgaattgacactcgatgcggaaatcagtgaactagatgtaccgcttgtggaagagctacttaaaccgacacggatttatgtgaagccagttttagaagtattgaaagaggtttatgtgcactttattacgcatgtgtctggtggcggatttgtagagaatttatcttttttgttaacaaatgatttagctgtcaaagtggagcttggtgcggggccggtgttgccgatttttgacgttatgaagaaatacggccaattgagcgaacttgaaatgtatgaaattttcaatatgggcattggtatggtgttggcagcggcgaaagcggatgtggaaagaacattagaagtactcgtgcaaaacggggaagcggcttatgttattggagaagttacgacacgtgaaaatgatgcggttattttcacaggaggcccaaaaggatgaatatagccatttttgcttcgggtaacggtgcgaattttcaagctttagaggatgatgcgttcattaagcctgatgtgaaactactggtatgtgataaaccaaatgcttatgttttagaacgcgcaaacacatatgagattccggtgttcctttttgaagcgaaaaatatccgggataaagaagcttttgagacagaaattttactagactttcgcgggttgganattgatntgttagtgctagcaggatatatgcgttgatgggnccgactttatagcagaatttcccgagcaanttgtcaacctgcacccatcgttgttacctgaattcaaaggaaaagatgcaattggtcaagcgattcaagccaatgtttcagaaactggtgtcacggcgcactttgtggatgcgggaatggatactggaccaattattgatcaagtgaaagtaccgattgaacatgcggaaactgtagatactttagctggaaaaattcatcaagtagaacatattttttatccaaaagtgattcgaggattaattcaaaatggagggaacgattaattatcatgaaaagagcgcttattagtgtgtcagataaaaacggcatcgtgccatttgcagaaaaattagtagaacttggagtagaaattatttcgacaggtggaacaaaagcggcatttgaacaagctggcgtaccggtaacaggaatagaagatgtaactgaatttccagaaatgcttgatggtcgcgtgaaaacacttcatccagcaattcatggtgggttactggcaagacgcgatacagctgaacatatggaagctattgcggcacacgatatcaagccaattgatttagtcgttgtaaatttatatcctttccaagaaacgattcaaaaatctggtgttactttagaagaagcgattgaaaatattgatattggcggaccttcgatgttacgctcagctgcgaaaaattatgcagcggtaactgttgtagttgatacagcggattacgatacggtacttacagaactagaagaacacggcgcaactacttttgaaacgcgccaacgtctagctgcgaaagtttttcggcacacagcggcctatgatgctttaattgcagaatacttaacgaacatcactggagaaactttcccagaaaaagtaacattaacttacaatcgaaaacaagttttgcgttatggtgaaaatcctcaccaagatgccgctttttatacagaacctggcacggtagaaaattcaattagttccgcgaaacagttgcacggtaaagagttatcttacaacaatattcgggatgcagatgcagcacttaaaattgcaagtgaatttacagagccggtcgcggttgcagtaaaacatatgaatccatgcggcgttggtgttggagaaaatattgaagaagcttatttgaaagcttatgaagcggatgaaacgtctatttttggagggattgttgccttaaataaagaagtggatgcgaaaacagccgaacatatgagcaaaattttcttagaaattattattgcgccaagtttctctgaagaagcgtttgccattttagcgaaaaagaaaaatattcgcttgttaactgttccgtttgccggttccgtaaaaggtttcgagaaaacatctgtaaatggtggacttcttattcaagcgagcgattctgttatagaagatacagcgagttatgaagtagtaacggaaaaacaacctacagaagcggaaatgaaagcattaattgctcagtggaaaattgtgaaacatgtaaaatccaatgcgatagtagtaggatctgataaacaaacacttggaattggtgcaggacaaatgaatcgaatcggttccgcgttaattgcacttgagcaagctggcgagaaagcaaaaggtgctgtacttgcctcggatgccttttttccaatggatgatacggtcgaagctgcggcaaaagcgggaatcacagcgattattcagcctggtggatccattaaagacaaggaatccattgagatggcaaacaaatatggtatttccatggttctaactcatgtacgacacttcaaacattaatcctcaaaaaggacgtgtaaataaatgaacttattagtagttggtagcggtggtagagaacatgctattagtaaaaaattattagaatccaacaatgtcgaaaaagtatactgtgctccgggaaacgacggaatgcgtttagacaacatccaactcgtagctatttctgaaacggataaagctggtttaattgattttgctaaaaaagcagaaattgcttttgttattgttgggcctgaagtgcctcttttagaaggcgttgtcgatgctctcgaagaagctggaattaaagcattcggtccaaaagcaaatgcagcattaattgaaggcagcaaagattttgcgaaacaatttatggagaaatatgctattccaaccgcagcatcaaaaaccttcaccgattatgcggaagcgaaagcatacttggatgagcgaggagtgccaatcgtcattaaagcagatggactcgctgctggaaaaggagtcactgtagcgttagaaatggaagaagcagttcttgcattaaaagatatgatgctagaagaaaaattcggtgacgcatctctcaaggtcgttatcgaggactttttagcgggagaagagttttcattgatggcgtttgtaaatggggaagaagtttatccaatggctatcgcgcaagatcataaacgcgcttatgaaggcgataaaggaccaaatactggcggaatgggagcttattctccggtaccacatatttctgaaacagtagtagacgaagctgtcgaaaaaattcttcttccagctgcaaaaggaatggtaaaagaaggtcgttatttccgcggaattctctatgctgggcttatcttaaccgcagaaggcccaaaagtaattgagtttaacgcacgctttggtgatccggaaacacaagttgttttgcctcgtttagagagtgattttgcagcactgatagacgctttactccataacgaaaaaccagatgtgcgctttaaaaaatcagggattacgctaggagttgtcctagcaagcgccggttatccagagcattatgaaaaaggaaacaaattaactggtctaaatgatgttgcagaagatgtagcgatttatcatgcaggtacaaaacaagatgaaaatgacgattttatttctgatggtggacgcgtcttgctactagcaaaagaagcagaaacgatgactgatgcacgcacattactttatccagaaatgcaaaaactagataacccgaatttcttttatcgaattgatattggcacaaaagcagaataattgaaaagtactatctcaaggataaattcctagatagtactttttttgttcattaagtgaagagaaacgtttgtgttttacgcgttggtacgttaaaatatgaaagtaggatatatgagattatttggaggtaaagatatgcaaatagagaagttgcgtggacaaggattggatgaattcttccaagggattttaacgctcgagaatttagaagaatgttatgctttttttgatgatgtttgtacagtgaatgaaatacagtccatggctcaacgtttccaagtagcaaaaatgcttcatgatggaaaaacatataatgtgattgaatctgaaactggggcaagtacagcaactatttcacgtgtaaaacgttcacttcattatggtaatgatatgtatgatgtagtattttcaagaatgacgaagccagaataagattgtagggattatattgaaaaagtttaatagtaaaacctatcagattgtcatcatctctattcttgcgcttgcagttatttattttgtgattaatatgattgccactggcacggggcttgatttttctttactgtggcactgggtctttattatttgttttattttcacgacacttgctaatgttagagaaaaacgagcaattggtacggcgattggccttagtggaatcttgatttgtgtaacaagcattgtccttatggcaatataagaaaagcaatctcgctaaaaacttagcggattgctttttttgttaaaacagaaaatcgattaaaccagttgcggagaggaagacgaaaataatcgcgattggtgcaatatatttaataagaaagagccaaagaataaacactttttttccaaaatggctgcttgtggtaaattcttttaaaagtaattcacgaggtaatcggtaaccaacgaa

SEQ ID NO: 3665 - DNA, 3379 bp, Listeria monocytogenes 4b
  misc_feature (1)..(end): n can be any nucleotide: a,g,c or t/u
taatatgctaatttttcatatgtttgtttttccatgctcatccctcgttttctatatattaaaagtattttctacgccaaaaaatgacagttactcccgttgtaattaaaagcgtaaataaaagaattaatgcaaatgcgtgctcattatgcatgaatggtagcttaatattcatcccataaatactagccacaatcgtgggtaatgacaaaataatggtaaatgatgttaaaaatttcatcacgatatttaaattgttcgaaataaccgaagaaaatacatccgacatcccgctaattatttgggtatatgtatccgtcattgcaattgcttgcttattttcaataataacatctctgagcaaatcatgattatcctcttgctgcataaaatgttctacatcttccattttatcgagaattgctttattcgattgaagggccgttgcaaaaaatactaaacttttctgaactgccataaaagcatacagttgctcatttttcatcgattgtttaatctgtatttctaaattatttgtttgtttaatgatttgatttaagtatttgaggtaataataagatacagcgtacaataattttaacaaaaattgcttatgattggttgtatcatattcttctaacttcatcgattgcacatcttttagaattggcagatctcgcaacgtgattgttacaagatgttttctagttaaaacaatcccaatcggaagtgtttcatacattgcgtagcctagttcatcctccgattcgtatggataatctacaatgactagtgaatgtctcacatcttgctctgctcgttttaattctatcctagagcgctcctcagaatctaatgcatccaaaatatacggtttgggcacatccatttccttactcaacatttctatttcgtcgtctgttggagcagttacttttacccaacaaccatcttccaaagcagaaatttgctccattttttcatttgttgtcttaaaaaattcaatcatctagatatctcccttcttcgtatcttctttacaaaatatttcatttgtgttacattattattaataataattcatttatgacaaaggagcgatgaaaatggaatttatgtctatgatagttacaggaattgttttagcagcaataatctcaggactttcttttgtggttggtaaacttagtggattatcttggttttggattgcgttttgtgcaaatagcggtttctttattattttcatcactgtgcaaaattcatttccagataacgcagccgtagccctttcgtatttaaatcttggaattggcgtagttttaattgctttaacgcttttccaatctagcaattggcttttcaagaaaacaatgcaacgtaaacattaaaataattagtctaatctaccattcccttattatcgcatcaaaaaactgtttaagctcgtttttcgcttaaacagttctttttttatttgaagtgaatcttaattccgttagaatctgtcacggaaatagtattttccaatcgtttcacatcatatccttgttctattaagttggttattattgcatctttatcaggagtaataattgtaaaccaagcgagtcccgtttcattttcttgcagaagttccaagttgcgacctgcccagacgtttgaaccgatgtgatgatgataatcaccagccgcaaaaaaccttgctgacggaatagcggtcgttaagttcattccaagtacctctttataaaattgttccgctttgtcagcatctgccacttgtaaatgcacatgaccaattatcgttccgtttggcatccctgtaaatggttcatcggtcgcaatttgaagcaacgaatccacatctacttgttctgtcaccatcggtaaattgccatcgccatcacgcatccattctgcttttggacggtctgcataaatttcaatgccattgccttcaatatcatgtaaataaagcgcctcgctataagcatgatctcccgcgccatcaatcggataacctgatttagccaaatgcagtaacacatccgctaaactttctcgcgttggcaaaagaaaggcggtatgaaacaagccaatccgcggcacttctggaacaaccgcattatctatctttttaagaacaagtaaagcttcatcagacccactcacgccgagccgaaccattcgctcattttcctctaataacttcaaaccaattacttcttgataaaaacctgccatctcttttaaatgtccaacattcaatacaacttcgccaagtcgtaattcttcactaatttctgccatgtaaaaaacgctccttttattgtaatacattcattacaacataaggagcgttcaaattccaataaaacgacttacaaaaagtaagttaattattttttaagtaactcactatgttttctaccataagcaaagtaaacaattaaaccaataacaaaccaaattccgcaaagaatccacgtatgaacagacaaacggctaattaaaaacgcacataataagaacgaaacaattggaagaactgggtaaaatggtactttaaatcctctcgcttgaatatctttatttttacgtaaaaagataatcccgatagacaccatcataaacgccaagagtgttccaatattaaccaactcagccaatcgatctaatggtacaagcccactaataatcgcgactatcactgcaaaaatccaggtgtttttaacaggtgtttgatatttttgattaatttctgcaagtacttttggtaataaaccatcacgtcccatcgcaaaaatcagtctagtcgccccgtaactcattactaaaattactgtaatcatcccaacaaccgcgccaagtgatacaatgccagctacccaatcttggttaatcacttgcaaagcataagccactggatctgttacgtttaaatctgtgtacggtaccattccagttaaaacagcggatacagcaacatataacaccgtacaaataagtagcgagcctataatcccaatcggcattgtccgttgcggatctttcacttcttcagctgcagacgaaacggcatcaaaacctaaataagcaaagaaaactagcgccgcaccattcataacgccactaattccaaatggcataaacggttgccaattatccggtttgacataaaatacaccaacaactaagaaaagtaaaataacaccaactttaatagctaccataatggtattcacgcgcgttgattcttttatcccaagcgtcaataaaaaggcaatcacaagaacaataataatcgccggcaaattaataaatgtacctacttctggattaaaaggcccagagattgcttctgggatggaaatat

SEQ ID NO: 3666 - DNA, 3775 bp, Listeria monocytogenes 4b
  misc_feature (1)..(end): n can be any nucleotide: a,g,c or t/u
gggctgtgaaaacaggcgtaaataagactcgtgcatttgctcaaggctttaaacaaggctggtctggtaaataaaagcataggaaaagggagagcatgaattgttaaattacttatcgtcactaaatccggtactgttagcacttcttgccggtatttttacatgggcttgtaccgcagcaggagcttcactcgtatttttctttaaaaatctaaataaaaaatggggcaatgttatgctaggatttgctgcaggcgttatgctcgcagcaagcttctggtcgcttcttgcccctgcaatcgaaatgagtaaagatttagggaagttttccttcgtaccagctctagttggctttttgcttgggggaatatttttacgtgttattgaccgtattattccacatttacatttcgggtttccagagcaagcgaaggaaggaccaaaaacttctcttcgaaaaagtatcttactggttctttccattactattcataatattccagaaggggcagctgttggggtagctttcggagcagttataactggagacacggagacgcttattactgcaatagttttggcgcttggtattggtattcaaaactttccagagggagcggcagtatccattcctttgcgcggagaagggctctcgagagggaaaagtttctggtatggccaactttcagcggtagttgaaccaattttcgctgtaattggtgctgtattggttgtttttgttacacctattttgccgtttgcgctggcctttgcagcaggtgcaatgatttttgttattgtagaggaattaattcctgaatctcaagtagaaggttcgaccgatttagcaactgctgcaacgatggcgggatttgcagtaatgatggttttagatgttgcgttaggataaaataataaactggacaaaaaacgacatttaatatttgcggaatgcgtttttttacggtaaaattaatagtgaaatacttcacaatatgttagttttcaggggtaatcctgtaactataaattggacacggtaaaagctcccactttatccgtgtcttttttttgacaattgttatagaattgttggtccttttttcctattttagtacaaaagctagaaagttgctttttttcatgtataattgttttataagaaaagctggggaaggtttttctaaggtgaggtgcataatgtgaaaattaggtggattagactttcactagttaccgttctcattattgccgtggtttttgttggtgtaataggtttccaaaaataccaattttcaaagtcgcgcaacaaagtaataatgcagatggacagactaatgaaagaccaagatggaggaaatttccgccgcttggataagaaagaaaatggagtggaaatcatttcttacattcctaaaacaactgagaaaaaagacaacgaaattatccaaaaagaaattgaaaaggccacagatgcagaggttaaaaagttaaatagagataaagaaactcaagggattattttttacacttaccaaaagcatagaatggccgagcaagcaatatcttataaagctgttcaatcagagtacgtaaaagaaggtagaactaaatttgtactcaaagataaaaaagatatttgcaaaaacatagtaaccgacgcagaaacaggtgctttgttaacacttggggaagtattaataaaaagtaatcaaactaaattaaatttaaaaacagctgttgaagaagaactgattaaaacagggggtttttctttaaaagatgttgggaatcttggggaaattaagagtttagtgaaatggaatcaaacagatttcgaaattacgaactctgaactaattttgccagtaaaaataccaggtgcaccggaaccgaataaagtaaaagtaaaacttgctgatattgctagttctgtgaataaacgctacttaccaagcagtgtgaaagttccagaagtgccaaaagcaaaaaccaacaagcgaattgcgcttacttttgatgatggtccaagtgcctcggtaacaccaggcgtacttgatacattgaaacgccacaatgtaaaagcgacattctttgtacttggctctagtgtcatacaaaatccgggtttagtaaaacgtgaattagaggaagggcaccaagttggcagccactcatgggatcacccgcaattaactaaacaatcgacacaagaagtgtacaaccaaattttaaaaacgcaaaaagcagtatttgatcaaactggatattttccaactacaatgcgccctccatatggtgcagtaaacaaacaggtggctgaagagattggtcttccaataattcagtggtctgttgatacagaagattggaaaaacaaaaatgctggtatagtaacgaaaaaagtccttgctggtgcaacggacggagcgattgtactaatgcatgatattcataaaaccactgctgcgagccttgacgctacattgactaaattaaagaatcaaggatatgagtttgttactattgatgaactttatggcgagaaattgcaaattgggaagcaatatttcgataaaacagattcaagaatggtgaaataaaaatcagtagctaagatgaatgaatcattttagctactttttttatacgaaatgtaaagttttctttacgtgaagctgtatttattttataataactgtaaatacttcttatttggtggtggttaattgaaagtccgtaataaagtgaaacagctgcgggaagaaagaggaatcggacaaaatgaattagctttagcattagaagtttcaagacaaacaatccatgctattgaaaaaggtaaatataatcctagtttagagctaagtttgaagatggcacgctattttcgtttaacaatagaagagatttttcaactggaggagaattagcatgaaacgatacattattaatcgaggtattatggttgcagtagttattatatatatgtatccacttttaggaataattaaaggggaaaaaatatttggagatatcggtacaccaattgttatgattattgcggctttaattggtacactgagttctgtattcttatctgaagaaaaaacgaagcgagaatatgagaaagaaaaactagaaaaagatgaaagatatatcaacaatcgcaaaacattctcccattatttgctgattgttttagctttgacgataccaattgtgttaattgttcttaatttaaatgggattgaacaaatctccatttcgagtctgacgattatttttcttatcttctgttttgcgtatatgattgttctagaaattatccgaaaaaaagtatgattttaggcaaaataaaaaacatccaacttgttcgttgcatgttacctagcatttaccaaattttggtgacaatgccataaatactattacgtgtaatccaaccattcacgtgtttgtgattattagaaatttgatattgtttaccgcggattttactgattttatgtgtaaaaaaactaccccgaactttccaaaatacgatatcgttgactttgagttctctcatgccaatcggttctaaacgaacaggtctcatcgatttaatcaaaggtaacatccaatttccgccttctttataacgctcaatggtttccgcacctctgagtatttctactgcatccaagcttctcataattaccctcctctcttttcgcttgtgccatcataaccaaatactaaaacccaactcaatctaatttttcactcactt

SEQ ID NO: 3667 - DNA, 1692 bp, Listeria monocytogenes 4b
  misc_feature (1)..(end): n can be any nucleotide: a,g,c or t/u
taaaatcataattatcgctagtaataaaactggaagtgcaataaaaaggtaagccattcgttgttggtgtatttgggcagatttatttctaattgttgccatcaataagcctccttcgttagttcttcaaaacatttgccattcgaaacccagctacatcaagtactaattcacaaaacatcatattagcccaagaaaaccattcgcgcgtaaagtcttccgggtaatctggatgaaacgattcatgcattaatccagttccggcatccgttcttaacaacatttgcaaaatttccagtttttctgatttatcacttgctgtcaatccttgaattgccagtccaattggccaaatatatcctgctggtgtatgcggactaccaattccttttgctagtttaccttcaaaataatacggatttgacttacttaaaataaacttccgcgtattctgataaatgggagattccttttcaagatattcgatgattggcatagagagtaaacttggaacatttgcatcatccatcaataattgatttccaagaccatctacttcaaaagcaaatatttcaccaaaagtcggatgattatatgtaccaaacttttcaatccctaattgaatatcattttgtaaagtaactgcttgttttatcgtttctatttctcttggataaaaagcttctataatttctttagcataacctaaaactactactgcaaacatatttgaagggataaggtacccatattcacaagcatcatcacttggtctaaatcctgaccaaagcattcctgtgtatgctgtttctgttcctagtccgtttctttttagagtatcagaaggaacacagtccatccgttcaaaacgatacggcgattttgtttcatgatgttgttctacttcccataaagcaaaaatcgtttgtaacatcttgaaaaatgctgagtcaaattgttctgttcttccagtaattttccaaataaagtacgctaattgaatcggatagcataatgaatcaatctcatattttcgttcccatacttgtggatgcatttctgttttatcagcttgatgtccagctccatttggtgtttcattaaaagcgttagcataaggatcaatttcaactaaactcacttgttctttgctaaggccaatcaacatcgactcaatttcttcattttctttagcaaaaattagaaaaggtcgtacttggcatactgaatcacgtagccacattgctggaatatcacctgttaaaataaatgtgagtccactatctcgaatttttatggtggtgtctaatgtgttttccatacaccttttatacatttcaactaatttttgattatttatttctttttttattttttccgtacttatttgtataaaatctcgatttgcaataaccaaatgtttcactcctttttaattaattatatttaattatcatttatcatatttaaataatactatatatatttaatctctgtcaacataaaattgaaatcgctttctttaggcattaaaaaaaactctgagaatctatatctcagagttttaaactttattcaaataacatatctaaaatcgcttctttttcaattccaccaaaatagtctttcgcatttatttcttgccaagcattttgaatagatttacgttcaaaacggcagccgattattttc

SEQ ID NO: 3668 - DNA, 3396 bp, Listeria monocytogenes 4b
  misc_feature (1)..(end): n can be any nucleotide: a,g,c or t/u
ggtgcctcgactactgttactttaactgtgaaagaaatcaaaacagctattaatgcacatgattctattctgtatattgatgataattggtcagcaaaagataattttgatagcgctagggataaggatggaaatatagtatcctttaatgacgtacaagtcttgggaactgttgatacaagtcaagcaggaacatacccgatcacatatgtttatgctggaattaccaaaaccattcaagtaattgttaaacatcccaaaacagctgtgcgagcccatgattcagtgatttatgttggagataattggaaagctcaagataattgggacaatacgctcgataaagctggtcaaaaagtgaaatggaaagatattactgtcaaagaaaatcctgccgtggatgtaacaaagccaggcgtctatgaagttacctacagttatgacggtatttctgccacgattaatgtaaccgtgaaaccaagaaaaacgactgtaaaaattcatgatagtagtttttatgccggaaatagttggaacgcgaaagataattttgaccatgcaacgaataaagcaggtgaaaaagtagcattcaaagatattactgtcgcaggtaatgttgatagcaaaacaccaggaacatatgaaattagctatgtatacgatggtgtgaaagctgttgctaaggtcactgttttgaaaaaccattctattttgatggtgaaagatcgtgtcataaaagtaggcgagaaatggaacgcgaaagatagctttattcaagcaactagacgtgatggaaaaaatattccattttcacaagtaaaagtgcaaggaaaagtaaatctgaacaaagcaggcaaataccaagttatatattcagtagatccaaatgaaggaactgaagacgcagggaaacaaatgttgtcagtaactgctactattcaggttgaaaatagaggagatgcggggttacaagataatgaaccacgaagcgtaaaagataacaatcaacgcgctgctaactccaacgatatcaaactcattcctaaaacaggagatcaaacaaatcagtgggttttatgggctggcctttgtttgactggtttagcaatgcttctatggggatttgctctaaggagacgaaaagtgaaataatatttattaaaaataaaaaaggaaggtttccaaacagcggaaaccttcctttttcgtgtattattaatgaaatgaactatcggaaactttgatagaaagcgaaggacatgcaaattctgcgtcaataaccgtttcaaccaagtcttcggggattacttttgttccagtgttattatctaatatattaaaggcaagaccttctgtatcataatcaaaaacatcaggtgcatgaatggaacaagcgccacaagcaatacaagtgtctttttcgacaagacaatacttcaattttctacgcttcctttctaaaataactatttgcagccagattttttctttttctattgtaccatattttgaaaaagtttttttcggaaaaattaatgtagaacaagtgtttctgtgttatgattatggtacaaaaaaaggtggtggacatgtcttggataagctagataactatattatgacaattttagaaaaaagtatcacacctagaaaattaccatttttacatactgttttagctggaagaagaactggacaagctgttcaagatatccatctttttcaaatgcaacatttatttggactagtgccaaatttaaaagcaagctatttagaaaaacgaatttcggaattagtgcaccaaggtagcattctttctactgaaaatggttatgtgacacaagggcaactagtagctatgtttgaaaatgattacccaaacttccaaggttttacatttcaagggcaagcttttgctttttttgcccatttgcgactcgcagttcaagttgttagtaacattcatcatcatgaaagctattatttaccagttattcgtgataagaaagtccaacaatttattaagcattggttgaagcaccgagataaatctaatttagcgaatcagttatacggtgaactcgttgcatggatgaataaattagcagttgctcgaccagcgtttttagtggaacgtttttctgggggcgaattaatgggctatactacagaacaaattgcctcaaaatatcaagtggagaagtgggacgtttattttgaggtgctccatgaggttcaccgtttgcttatagcgatgaaaaaaacccccgaagaatggccgattctagctagtcttgtaccggatgagctcaatgggttaactagttctgccatgcaaacctatgtattatggcaaaatggagctgatttagaagcaatcgagcgaattcggaatttgaaaaagagtaccatccatgatcactttgtagaaatccgagctactttgaaagaagcgaatgttccttatttaccagaagagacaatcatccaaacgattattacaaagaaatggaatttactgcgtgaaataaaagcggagtttcctgatttggattattatcaaattcggttagcagttgttagtagggagggtaagcagtgaacttagaaaaggaattaaaagaatatcttggtttagatgagttccgccctggccaaaaagaagtaattgaaacagctttagcaaagcgaaattgttttgctatgttacctactggaacaggaaaaaccatttgttatcaattagcgggtcatttgatggatggattagtattgattgtttctccacttctctcccttatgcaagatcaaatggagcgaatgcgtgctcacggagaaaagcgagtagcagcgcttaatagctttttaaaacgagaagaaaaagggcaagtccttgcaaacattcatttatataaatttatttttttatcaccagaaatgctaaataatgaaacggtgaaaaacttactattaaaacaaagaatcagcttatttgtcatagatgaagcgcattgcatttcgcagtggggacatgattttcgccctgattatttgatgttaggtaagttcattcaagaagccgaatttcctgtgactatggtgctgacagctacggcaaccaagaaagttagagcagatattttaacgcaattacatctaacggattgtgtgcaaattgtttattctgttaatcgaccgaatatttctttacaagtggagaaattttctaaccagcatgtaaaaaaagaccgtttatatgcgcttgttcgcaaactacaaacacccggaattatgtatttggctagtaaaaaattagcggaaagcattgcgcatgaatgaagcgaaattgctgattgaagagtagctgattatcacggggatatggatacagaagaa

SEQ ID NO: 3669 - DNA, 1694 bp, Listeria monocytogenes 4b
  misc_feature (1)..(end): n can be any nucleotide: a,g,c or t/u
gcccggaaagatatccggagaagtaagcttgtggtcaggggggtgggtggggggacctttttagtatcagctattatgtcaccaatttggggtaaactagctgaccaaaaagggcggagaattatgcttttgcgagctgcgctaggtatggcgatagcgatgattctgatgggactcgtaagcaatgtataccaatttgttggtttgcgcttattaatggggattttttcaggatatatttcaacagcaaatgcccttattgctacacaagttcctcgtcatcgtagcggctgggctctcggggcattatccacggcggcggtttcgggtgtgctaattggcccgttaattggcggagcgctgtctgatacatttggcgtcagaccagtgttttacatcacaggagtacttcttttaggtagctttttcctcacactgttctttgtgaaagagaaatttacaccagtagaaaaaaaggaaatgcggtcggggaaagaagttttcttgtcgcttaaaaacccgggcttgattatttccttatttattacgacaatgatgattcaaattgcgtccaactcagtgaacccgattttgacattatacgtgcgtgatttggcaggaaatgcgcaaaacatcgcttttattagtgggatgattgcatctgttccaggggttgcggcacttattgcggcaccgagacttgggagatggggagaccgaattggttcggagcgaatattgttaggtgcgctcataggttcaatgttactccaaattccaatggctttcgcacaaaacccactacaacttgggattttacgtttcttattagggcttacagacggcgccttgcttccagcggttcaatcattgcttacaaaaaatacaccgcgcgaggtttcaggtcggatttttggttataatcaatcgtttcaatacattgggaatgttatcggaccgcttgttgggtcaagtgttgccgcccattttggttacggagatgtcttcctcgtagttgcaggctttatttttatcaatgtactaatcagtttttatttcaaccgaaaaatgcatggagagaagggaaatcatgccaactgaactaataaaattaccaggaataggtaaaaaaatggtgttaatgttaaatgaaattggggttgaagaggttgctgatttaaaagggaagaatccgcttgagttatatgaggatacttgcgataagcgaggcgagagaatggatccgtgtgtactttatacgtatcgctgcgcagtctatgttgcggaaacggatgaagcggagcaagatgttgatttgcgaaaatggtggaactggaaagataaacaacatacaaatgaaaggaatttaaagaatgaataagttgaatgaagcacttaaaaaagctgaacacatcgtttttcttaccggggcgggtgtttcagtgccttctggaattccggattatcgctcgaaaaacggcttatatgctgggatgagtagcccggaatatatgttgagccatacgtgtcttgtgcgtgaaccggagaagttttatcaatttgttacagaaaacatgtactatccggatgcagagccaaatgcgattcatacaaaaatggctgaaatcgaagcggaaaaagatgtcacgattattacgcaaaatattgatggtttgcatgaaaaagcaggttca

SEQ ID NO: 3670 - DNA, 2710 bp, Listeria monocytogenes 4b
  misc_feature (1)..(end): n can be any nucleotide: a,g,c or t/u
gcgtcaattcaagaacgagggttcttcccttacataatttttgcacttcaaaaacaacaagcgtcagacatttaacggactagggaattctaccttcatgaatcgtgatttcaacaatagctttatctttcgttttatcagaagaacgtacttttacttgggctggggctgttttgcgaccatcaatcaccacaccacgttctaactgacgaatcacttcacgttcaggaatacctttgattcgtgcgatatatgttttggaaacttcatttttcggatgcattagtaagttagcgaaatccccatcattggtcattaataataaaccagatgtatcataatcaagtcgccctactgggtataatctttcaggaatatctgcaaaataatccgctacagttgtacgacctttatcatctgttacagccgaaaccgttcctcttggcttataaaaaaggaaatagcgatgttcttcttttgttagttgaattccctcaacttcaattcgctccgtaccactaactttcacacctaattctgtgactactttcccgttcactgttactttaccttcttgaataagcttttctgcttttcttcttgaagtaatacctgcatttgcaatcactttttgtaaacgttccattcttattcctcctcctgttctttactttggttaaaccggtcaaaaaacaggtccatttcattctgatctggttcatctgtcgctggatcagcaagttttggtaaatcctctagagaattaagtccaaaagcatctaaaaactcacttgtagtaacgtaaagttttgctcgtccagctccgtcgacacgacctttatccgttacaagtcctttggctactaaagttcgaatcggtccatctgtttgaaccccgcgaacctcgtctacttccattcttgtaactggttggcggtaagcaataattgctaatgtctctaatgatgcttgcgataaaacggtgttgcttggaacttcgactaatttacgtaaaaattctgcatgcgcttttttcgtagctaattgaaatgttccagcaagctccaaaagaattaaacctctgtcagcacttccgttgtatcgatcacttaaaagttctagtaaattgagtgcttcaatgtgcgtaatttccatgacttcagttaattgttccgttgaaagccccgcatctcccgccgcaaaaagcaaactctctaatacgcctaattgttcttctctgttcacgatatttcttcccctttaccttgcacatataaatccgcaaaactttccgcttgttctacttcgaccaattttcgcttcattaattctaacaaagccaaaaacgtaacgacaagttgctctttcgtttgttcttcaaataactcgtcaaatcgcaagcgatgattgacttgtaaatttaatttttctaaaacagaatccattctttgatcaatggagatttcttgtgttgtaattcttgtatggagaggtttatttaactttttccgacgtagcattttgttaaaagcacttagcatatcgtttaatgatacgtccagttctgccaccttagtaccatcatcatattctgctaaatccattggaggtttactgaaataaaagctccgttccgcctctttttcttttaattcttttgcggcttctttgaatcgtttgtattccattagtttttcgactaaagcatcacgaggatcctcttcctcttctagtgtatcataatcgatttccagttcttgctttggaagtagcatcttacttttaattgctagtaaagttgctgccatcactaaatattcactcgcgacatctaattccatttcttgcattgtatgaacaaattccatgtattggtccgtaatttcagccatagggatgtcataaatatcgacttctagttgtccaattaaatgaagaagtaagtcaagcggtccttcaaacgcgtccactttaaaattcatttctaccatatctgtcccgccctactataatgaaagatcattttgcactaaattttcatatgtttcgcgggcaacgattaatttatcgactccgttttccacaaaaacaactggtggtcttgggatacggttataattacttgccatcgcataaccataggctccagtacaaaataccgccaaaacttcaccggcgtttgatttcggtagtggtaagtcccatattaacatatcaccagactcacagcattttcctgcgatagccactgtttcttctgcgactttctctgggtttgccgcaagaacagcatcgtaatgcgcatcatataacgctggacggatattatcagacatgccgccgtcaactgcgatataattccgaattcccggaacttctttacgcgatccaactttataaagtgttgtacctgcttcaccaacaagggaacgacctggctcaatccaaatttctggaatatcaatatcgttattattagccacatcccgcacttcatccataatttggcgcacatattcgctaggttcaagaggttcatcttctgccgtataacggacaccgaaaccgccaccaagattaagtactttggaatcaaatcccagagtttggtgccattcaactaatttatccataatacgacgagccgctaatttaaaacccgttgtttcaaaaatttgcgacccaatatgacagagtctttccagcacac

SEQ ID NO: 3671 - DNA, 2713 bp, Listeria monocytogenes 4b
  misc_feature (1)..(end): n can be any nucleotide: a,g,c or t/u
taatagtatcttgaccagctgtttcttgcgttgtataaacggcacttactgaatcatcttcctgtgtaatcgtgacaaatccgtctatcttaccgtctttcagagcggactgggcggattttttgtctttaatgtccgtatttactttgaaatgatttttatcagcagccaaagatttggcaaaaacagggtcttctgcaagtaccgcaagctttgtaatatcactacttgagtcaaaatagtcgaccattttcggaataccagcgatgagcgcggcgattaaaacgggaaaaagtagtgaaattaaaaatgattttgttttcacgcgtcttttgtaaacttgcttcgtaatcacccaaaatttactcatttagctcaccagccttccatttgaaaatttcttcgagcgtcggagcttggagactaaacgtttgaatgaaaccatcttttgtcacatattcaaaaattttctctgcgtcactttcattttcaatttcaagttgcagaaccccgtcgcggtgggtttgaacatttaaaacacctggtaaagtagcgagttctgctgcactatgactagattcaatcaaaatacgtttacgaccaaaaaccgattttacagattccgttgttccttggaggaccacatttcctttttttaacattaatagcgagtcgcaaagttcctccacattctccatccgatgactagaaaaaataatagcagcccctgaagcgcgtaagtcaaatacaaactttttgagaatttctgcattgactgggtctaacccgctgaatggttcatctaagataactagttttggttggtgaataattgtacttaaaagctgaattttttgttgattgcctttggatagtgttttgatcaagtctgtttttttaccgacaatttcagcgcgttctagccagctatcaatttctgcctttattttttgttttggatatccttttaattcagcaaaaaatattaattgttcttcaattgtgacatttggatataaaccacgttcttcgggcaaataaccgataatatttggatcgattttgcttacttctttgccgtcccaagtgatttttccagaagtagcttctaaaaaatgcaaaataaggcgaaaagtagttgttttaccagcgccattttgaccaattaatccgagtatttttcctggttctactcgaaacgataaatcattgacagcgacttttgttccaaattttttcgtaacattatgtagttcaagcgtcacacgagcacccctttctaattgttccctgtttttattatacggttttattggaggattgtcttgctaaaagtaaagagctacgacgacgacttttttcacaaactcagccaaaaaattgtctagtgtagtggacataacttgttgtaaccgttttcttttatttgtgtataatagagcgtagagggaggtgatgaaatgcttctaaccaaatcggagcatgcattaattaacttgttcttaacgaaaaacgattttttgacagcaaagcaattagctgaaattctagacgtttcctctaaaacgatttatcgcaagattaaaaacatcaatgagacaactggaagaaaggatatcatcatttctgaaaaggggcgtggttttaagttagattataaagcttacatacaagctaaattagaaacgacaggtgatatttttggctatacaccaacagaaagacgtgaaaaaatcttgctgcaagtattgtttaaatcaccaaagtacttgaatgtaacagagctgtatgaagattattatgttgggtataattcaatcaaaaatgatttctctcttttaaatcaagccatcgagaaatatgatttggctcttgaaaaaaggcaaaaagaaatacgggttgttggcactgaagaaaacatccggaccgccattaatgaagtgattaacaacttggatttatcgacctatgatgatttgaaaacagaatacagtgatctcaataaagctgacgttcagtttattgtgcggcaaatggagttgattgagaacaagctgatgattagcattccgtatccgtatgatattaatatcttttcacatttgtatattttaatcaaccgtttccgtcaaggggaagtagaagattttaaagaaagtgatgatgcttatatcgtcacaaatgaaaaattgcatacgattgctgtagaagccattgatgcaattgaacaatatttgagaatgaagctaccggagagagagactttccattttttacaaggcttgatttcttctcgttttaaccatgaaatcgaattagttccaggtaaaattttaccgattgtggaagagatgactgatttttatattgaacaagtggctgctaaaattaatatgccgattaataaaaagcaattaaagatcgagctattgagccatatgaagccaatggtaaaccgaatgaatcatcaaattaatataaagaataatttgttaagcgacatcaaattagagtatggcagactatttgaaatcatcaaagaaactgcaaatgatgtagcaaaaacctttaaattaaatacaatttctgatgataaagttggctatattnccataatttccagcncntgtcgnncgctcgagcatgctgtagagtngcatacaatntnncnaaaaaantcataggcagtgnnccctngcntaagtggcccccc

SEQ ID NO: 3672 - DNA, 3632 bp, Listeria monocytogenes 4b
  misc_feature (1)..(end): n can be any nucleotide: a,g,c or t/u
aatcgcgccaccgttatgataaattcgtgtttacaacagtgaatatagctagccgataaagtaaaaaagaaactagaaaaagtgagaaatcattttatctagtttctttttttaggaagaattaatgaagtataggtcattattagattcactttttttaaaagaatagaatcgttcacaatatagacatatttatacacttgctaatagtttagagttcttttataatatttagcccaattatgtacagattttaaatatagttctattgtttaagcgatatgaaactgtggaatggaatagaatagtattacttctagtaaaagattatttaattggtttgaaaatttgtttattcacaaaatagacacattctaactcattgataatgttttttgcctaatatataattgtttagcttaattaagcgctagttttgctctctttttgataggaagagtgagcagttaaaatgagaatttaattatatggggaagggattgcactatgaagaaaaaatacattctttgcttattcgcagtgatgttattttgtacgggtttcctttttggaaattcgcaagttgatgctgctgaaacggatacaagcaatgtcacgtataaatacattgatatcagcacattaacggaaacacaaaaaaatagtattatcaaagggaagccaaacgagacacttacaaatgattatgaaaactattcctttgtgtatcaaaaaaatacttcaggaccaactacaaatacagataatacttctgacaataataaagatcaaaatggaacactattaaaagctggagatgttggcccaaatatttatttagtcattctagggtttattttattaggaagtggcattgggcttcttacattgaaaaaaagacacgctaagcagctgttagtatttcttcttgtccttggcggtagtagtttgttagttgggtcgattgttcaagcaacagagaatagtaacttaaaaacccaagaatctcaaaccgtcgtaaaaggaacaaaagaaacgaaacaacccgaatcaattgcagggtatacatacgtaggatatatacatacaagtaaaaataatacagcgcccccggttgaaaaagggattgtaacggtaaactatcaagacgaacaaggaaattcagttgcggccactgaaacattagaaggcgacatcggcaaaccatatcagacttctatgaaaaatatcgagggctatacgtggaaagaagtcaaaggagaagcaaccgggacttttacagaaaaagcacaagtcgttacttatgtttatcaaaaagtgtccgtagctactgtaactgttagatacctcgatcaagatggaaaaccaatccacgagccacaaacaattagcggaaatgttggcgaaccttacgatgcttcaacagataaatacaaattacaaattgatggttatgttttagatacaacaaaactaccgaacaatgcgaatggaacgttcacaaatcaagccacgcaagtaacttatatttatacgaaagaagcacaagatgttaccataacaattaagtttgttgataacaatggaaatccatttgttttaacggatttaacaacctataaaaatggtgatttagtacctgtttatcctaatttagaccaataccatatgagattaaattataatcaacaaatctatagccaaggagaagcagtatctgatattgttctttctgctaaagaaggagaaacgtattccttaccagaaagaatgaccttcaatataatagatgacaaaggcaatgaaatcccctatgtgatttcgcaaaatcctgactttagtagtagcgggattgagaagtgggaaaactaccgaagtataccagccaaccatgaagggacacttactggagaaaatgtagtggttacgtatcagatatttgtttatggagtaatgattcctgcgccataaagtgagaagccgtgtatttgaaaaaaaccaatctctattagagattggtttttttcaaatacgttctttacgctcacggaatgttctaatactatgattgaaaacctctgataacattaatccagcggcaatcgcgccagcaacgactgttacttgcacagaaaagccaattgcttccgtataatcacctaatacaaaattacgcacagcttggtaagcaagtcccccaggaacgagcgggacaattcccggaacattaaaaatcgtaattggcaatttcttatatttcgcaaaaaagtgactgagtacagcgacgacgaaagcccctgctagagaggatgcgcctgttccagagtccatttgcattaaagtccaataagccatccagccaaatgttccggtaataccacaagcattcaacgctcttttcggaacgtttgtaataatcgcaaacgtcaccgtcgcaacgtaacttagcactaattgaataataatagtccaaactaaatccattatagcgcctcctttataagaaaaagcggaaaacaaccgcgattccaattcctattgcacaagaagtaagtagcgcttctgttccacgtgccattccactaagcaaatgcccagcaatcaaatcccgaaccgcattcgtaatcggcaccccgggaacaagcggcatcacgccaccgataatcatcgtgtccagattaataccccaaccaatcgaaatcgtcaaaacagctaagagcccgacacttaatgaagctaaaaattctgctagaaacttcaccttcataaaaatctgcgtgtagtaaaaaataataaaaccaatagcgccaatgatacaagtcggaataaaatcaaaccaacccccgccaaaaataaccatcaacgatccactaacgagtgatgccgcaataatctgcaaccaaataggaaagtagcgaacatctttatctaaattaacgagctttgtatgtaattcttttaaggaaattctcttttccgcgaaatccctggaaaattcattgaccatagatactttttctaaattaatggttcttgtgggaatttgctgtaattgtacattacgctcaccttcaagtgacataaaaagcccagttggcgtcacgaaactaatcccttttttattactagcgatggttgcaatgcggttcattgtatcttccacgcgatacatttcagcgccactttccatcattattttgcctgccattaagcatgtttctagcaaataatctgttgtttcagtcgacataactaagcacctccaaccctttattccttctcaatcgtaacgcaatcaaatcaaaaattctagtgggaagggtgcattttttgaatttgtgattgtttcgatgtgatttggggtaaatatttgatagtatggtagatatagaatcagaaaggataggatattttggcaatattgatataatcatcaaatgcttttaatcctgtggagatacaaatgagcccacacagaaaacnnnnnnnnnnnnnnnnnnnnnnnnnnnnnnnnnnnnnnnnnnnnnnnnnnnnnnnnnnnnnnnnnnnnnnnnnnnnnnnnnnnnnnnnnnnnnnnnnnnnnnnnnnnnnnnnnnnnnnnnnnnnnnnnnnnnnntngnnnnnnnanggct

SEQ ID NO: 3673 - DNA, 2889 bp, Listeria monocytogenes 4b
  misc_feature (1)..(end): n can be any nucleotide: a,g,c or t/u
agagtatactggtaaatccgcacttaaagatgcaataaataacgatgaaacaattacttctaaattgatttttgaactaggagcagaagatgatgctttagcaaatgaaacaattgataaaatttctttctatttggctttagcgctcagtcatattggaaacatgttaaatccagagaagattattattggtggtggcgtttcagcagcaggcgatcaattattaacaccggttaaaacttattttgagacaatggttttcccagctgttaaagaatccactaaattatctattgcgacaaaagggaatgacgcagggataattggagctgcatggttagcgctaccaagtgaagattaatattaatattaatttgtataagctacaataacactccattattgtagcttgttttataaagctaatctttctataacgcattgttttagcttcctttgaaaagggtaaaattttagcatagagagattggaggccagagatgaaaaaatcaaatgtttttttgctgattaccttattagtcggattggtttttatctcttttggttgctcggaggaaaaagaaacgccaaaaaagactgcaaaagaagtacaaggtgttcaaatcaaaaccaaagaattccagcgagtagttggttggttgtcaaaagattctgttttgctgcaaaccaaaaaatctggagttacgtattttgaagaattgaatatatataatgaaaagaaaagaccaatctttaatacgaaggaatctatttctgaagtgcaaattagtccagactatcgaaatatcttactttattctgctgaatcagctgaaaaagccacgatgcgaataatcgctttgaatgatggttcaactgttgcttcacgttcaacaaagcctctaacgacgacattttattggaatgatgagtcacctgaaaaaatcatgtttgtctcatatagtccagaatggaattttcaaatagaaaattgggactatacgttgaatcaactgcataaaatagatgtcgcgtcaccttttatttcctggtacggagataatttggtgatttcgaacaataaagacaaaccggatgatgaattaggaaacctttatttacaagacattagagataacgctactaaaaatttaattgtagctaatattatgcaatttgctgttcacgataatgtactgcttactattgaaaaaaactctgatgaaaaattattatacgattttagaacactgggatttcaaaatttcttttcgtataatgctgcacgagaatacgatgaattagggacttttgttccgtattttgatacaaattttgataagaatacttttctaacatttgttccatataaaagcgctaaaattggcagcggagcaaaagagtataagttagtaaaaattgatccaacgaacaaaaaagaatcgactatcttggaattaatggataaccaacctattttatcttatgaaacaggggatttagttctctatggttatttatttgataaggtaatcgatacgaaaacaggtaaaatgtataatttaattaatacaccaactaaatctttttaaaacaacgagttccttctttaagggctcgttgtttttgctaatgtatagccgttttctagtgtgatttgacagttgaattctgttagttgattatccgtcgcctggcaatctatctttgcgcctttgaaatttattttaaattgatgtgaaagtgaggatgtttccttaatttctatgaaagctaaatttagtttagtggaggctaaataataattttgaatcattttttcatattgtatttgtgtcttaaagatagaagcagtaccagtaacgattaaaattgaaataagcgcaatgaaaatggtaaatgggagcgtaaatgcattagtcttcatggattggataccacttctggtaatgcgaatacagatgtatatatctgagtattagagtcttgcaccgttaaatgaagttgtttttctttcttgattaattgataatctttcacattagtaagcaatggttcatgtccttttccatttacttgtcgacgaactaaatcattatatttggaataggtgataagatctttgccattactaaaagaaagcttattcctatcaatctgaatattagtcgctttttctaattctagacgagtttgaatgagaaaaagttgccattctgttgtctgatcaatgttactaatctggatagtcttgttatagcattgaaaaaataatggaatgagcgagctaatacttaaaatgatcgtaatagacaagattgtttcaagaagagtgaaagcaggtgagccatttctaaaagatacatttttcttccgatttattttttgcacaaatttggatacctccttgataatggaaactttcgatacgttcatccttaaagttaactggaacgcttttgtgccgtaatagttcgctatgttcgtaaatttcttgatagactctgctagtttctttttgatagtctagtttttcaaaaatagtcattgctgtgggtaatagaaaactacaaaccattgaaaaaaggagaagtgaaaccatgctttcaactaaagagaatccgttaattttattcaattctaaaacgcccctttccgatttgaaatattagcttgtagttatttgtcgaacttgtcaggtgaattgccgaaaaacgattaatggatccatctgtactcgagaaacgaaaatttgctatttttggttgtgttaagttgaccagtgcgagaatggcacgatccccagcgtgctcgagccttcgtttgcgatgacccgcggttcttcgatcgcctgatataacggactgagctataagaaaagaaataaaa

SEQ ID NO: 3674 - DNA, 3050 bp, Listeria monocytogenes 4b
  misc_feature (1)..(end): n can be any nucleotide: a,g,c or t/u
tgatgggcgtaacgatgattgcttatggctttacgcgccaaaaactagcagaaaagaatcaattagttgcggttagtgtttctagtattgttgcttttgtttttaattgtccattatcattacttgcactttatccattaatgcatcaagcggtgtttgttttgttcccagtgcttgctattggttcgatttgcaacatttttgtcgcagaagtcgtttaccaagtattgccagaacgctggaaaagacgaattgccgggtactaaacaactaaataggtgaatatattaatccgggaaagaggtgaaaatcctctacaggccctagctactgtaatacggacgaaaaccaaacatatgtcactggaagcaattccgggaagactggtgagtaggatgatgttaagtcaggagaccgcttttatattcgatatccaaaaacaacttctaagggagcgagttgtcttgattaagtagattttcacgatggggaagtttctttgtgctacaaggaaatagcttatttgcgtaaatctcaaaaagacgccaatgttctgtttggcgtctttttttatggctaaagtgaaaggtgaaaaaagatgaacaaaatcttaattgcagctgcatcaagtggtacaggtaaaacaacgatcacacttggaattatgcacgcgctaaaaaaaagaggtctgcgggttcaaccatttaaagtaggtccagattatattgatacaaattatcatcaagcgataacaggcgttgcttctatcaatttagacagttttctgatagatgatgatgcgatgctagctactctttttcaaaagcacggagagtcggcggatatttccgtcattgaaggtgtaatgggtctttttgatggacttggtattgatcgtgataattcgagtacatcttttattgctaaatgcacgaaaacgcctgtaattttagtcgtggatggtaaagcgatatccacttctgcggcggcaattgtggatggatttaatcgttttgatccggaattaaccattgctggggtgattattaatcgcgttgcttcagaaaaccatttttcattgataaaaggggcgattgaacgctatacggatgtacctgttttagggtatttgccgaaaaatgcggcggtggcacttccagaacgtcatctcggattagtgccaaaagaggaaatgacggaattagaaacgaaatgggagttacttggtgatttgattgcggaacatgttgatttagataggttgttagcacttagtaagactggtgcgaaattgaccgtacacccaccagaaatacaagtaccggacttttcgggagtgcgcgttgcttatgccctcgacgccgcatttcatttttactatcaagataacttggattttattcgctcaactggagccacactgattccgtttagtccgctagaagaaagggaagttccggacgctgattttatttatatcggtggtggatttccggaggtttttgcggaacggctagcgaagaacaagtcaatgcgcgaatcgattttggcggcgcatgaacaaggcaagccaatatatgccgagtgtggcggattgatgtatcttggttcgagtttagaaatggaagctgaatcctatgaaatggtaggggtttttgatggagttagtaagatgacaacgcggcttcggaagtttggctactgtatcgccgaacctttagaagacacactacttggtaaaaaagggacagctattcgcggtcatgaatttcatcattctgtttttgaaacgaccgaaccaacacgtatgaaattaacgaaaaagcgggatggcaaaattgtcaaagaatggcacggcggttatcaaaaaggtaatacgttcgctagttacctgcatatccatttctatcaaaatctattgataataacgcatatgtttggagcgatagagcgatgatattgttattttatacgtcatcattcattttagattgcttattaggtgatccatatagctggccgcatcctattaaagcgatcggcaacttgattaagtggttgactattattttacgaaaaatctttcatggtaaatcactgtattttgccggtggattgctatttgttctcacggttggtatgactggagttgtatcctggttcattctatttcttagtgccaaaattgcttactggctttacgtagctgtttttgtttacttaggctatacgacgcttgcgatgacttgccttgcgaaagaggctcggaaaatacagcggaccttggcggacggggatttggctgctgcaagagtgcaagtgggaatgattgttggtcgggatacggataagttaaccgcagaagaaattagtaaagcgacgatagagactgtggcggaaaatacagcggatggcgttatcgcaccacttttttacttattcattggtgggccggtacttgctttgatgtataaagcggttaatacactggattcgatggtcggttataaaaacgaaaaataccgcgcaattggttttgtttccgcgaaaatggatgacattgccaattttatcccagcgagattagcttggtttttccttgtcattgcaagttttattttaaggtatgacgggcgtgcttcttggcaaatcgggcttcgagatcggaaaaaccatacgagtcctaattgcgcttatcctgaaggtgcagtagcaggagcgcttggaatcacacttggtggaacgcatgagtacttcggtgaaacagtcattaaaccaaccattggaagtggaaataaacccgtttcagaaaaagaaattagccaaacgattcatttgctatatacggcttcaacgatcgcttttatcatttttgcaagtatttatctactattattttaaaggagtggcaagatgaactatattaagaatccagccaaaattgaagagaaaagctttgaaattattcaacaaattattaatgatattcgtccagattacacatttcanaacaagttagaggaagcgattatcaagcgtgcaatacatac

SEQ ID NO: 3675 - DNA, 2679 bp, Listeria monocytogenes 4b
  misc_feature (1)..(end): n can be any nucleotide: a,g,c or t/u
tctacaggaaatcaggtagaaataacgggggatgaattttcattaagaatattctatgccttcctttttttagtcgcatatagcggggatcgttggccattttcttttgttcgatatgatgaaatcactgacttattagagagttgtccaaaagaaatttatagagcaaactcgatagataaggcgatgatgattcattattatgtcgctatgcatttattaagagatcgaatgaattgtcaaattgatacaactaggcagtttaaagtggccctatataaggcttgcaccgaggagtctaagaaatcagaaagtgcgttcattaaaaaggtagcgaaacaacttcctaataggaactataaagaaatgacctacacgacgcaaattatactgagtaccattgttgctttcggcagttattcttccattgaaaaaatgccttcctttttctacatggatgaacagttagaagaaatgggcttcatgaaactagttgattttgccagtgaacgagtaaatgataatctctctattccattttcagagaaagagatggaattgctccgttactcctttgcgagtataaattatagatatttcttacttgataatttaattaataagttcaataatattgtgccagggtatacagatcttgatcgaaatataagaaaaatccataaagtgaatcacctagaaccattgattagtcaattagtaaatttaaaagaaatggatccattaaaaccgtttgaagaaagacttacttcagattatctgatcattttggataaacggattgatttttctatacacaccttgcctattaaagtaactattttatcgaccatatctaatgaaacagccgtatttgattttatgaggtatttttctagttactacaatctggaaataattaatcaagttgatccggtggtggatttatatataagtgatttttccgtatctcccgaagtattgacctctttacgtatcaatcagccaataatctatgtaaatactagatggctagaatctgattatgtcaaaattaatgataatctggcgaaaatagcgagaaaaaatttatcgctaataaaaaagattagggaaacacttgttggaatggatatggaaaatgtttaaatggaaaaccaaggtcttgtccgagtaatgatcgttactcggatttttttatttctatttttcatttgtacaatactaatggaaaaagtaaacacaccaactaagccgtaaaattttaagaagttaaaattttatggccagaaatgcttctcgactcctctataattaagttgcagctagaaagtttgcatctagaaattaactacgaaagaaggaggggagctgatgaagaagttttccatgcgagtggtgcttattatttctgtgctttttattgcactggggaacgctaatgtttctatcgcacaagaaagggacacaacgaataagcttccagaagaggagctgggttctctggatacctctaatcttattgcagaagaagtcgcacaagacaaaccagcagaggtcgagaacttagaagaaattccaactacggatgagttgatgcaaaatccagatgttcgagagcagtctgttgccgattcggatgatccggatttaacagcggtaagctcgggtgattactggacgatttattataattctgcgaacgatgaatatagcttgcgtatgtttggcaacgtaccaagcagtaaaccgagcgcttggaatagttatttgaaatacattaaacatatagagattgaagaagctactttaacaggggatttttcatcgtattttagaagtaatgttttcacagtacttgagagtgtgaggattgaacgttcaaatttgtctggagtgacgtcttttgcaagggcatttgaaggtgacagtgaatcagaatcaccacttgaaaaagtgattatcagagataattattatccggagacgccttctttaacaaatataagtagaatgtttaccttatgtcgtaaacttagtgagcttgatgtgagtggactcaatacaagttccgtcactaaaatggataccatatttagtaacgcgaatagccttaaagaactggatgtaagtcattttgatacgagttcagtgactgatatgagctccatgtttgctgcttgtaatagtcttgaagagcttgatgtaagtaattttgatacgagttccgttactaatatgaagtatatgttgagtggactccacttgaaaaaactagatgtaagcaactttgatacaagttccgttaccaatatgtatggcatgtttgcttattgttacaatcttgaagagttagatgtaagcaactttgatacaagttccgtgaataatatgctgcatatgttttatgtttgtaataatcttgaagagctagatttaagtaactttgacaccagttccgttactaatatgtttgccatgtttgcttattgtactagtcttaaagaaatagatgtaagtaattttgatacgagttctgtaactactatgagtgccatgttttttgagtgcagctcacttgaagcgctagatttaagtaactttgatactagttccgtgactactatggcttccatgtttgaaaattctacagcgttaaaatctttatatttagataatttt

SEQ ID NO: 3676 - DNA, 2943 bp, Listeria monocytogenes 4b
  misc_feature (1)..(end): n can be any nucleotide: a,g,c or t/u
aagatgttatgacaaaggaaaacctagtgacagcgccagttggaactacgctaaaacaagctgagcagattctgcaaaaacaccgcatcgagaaattgccacttgttgacgaagcaggtattctaaaagggcttatcactattaaagatattgaaaaagtaattgaattcccgaactctgctaaagacaagcatggtagactacttgccgcagcagctgttggaattacgaatgatacttttgtacgtgtagagaaattaatcgaggcgggtgttgatgcgattgttattgatactgcgcacggacattcagcgggagttattaataaaatttccgaaattcgccaaactttcaaagatgtagtaattgttgccggaaacgttgcaacagctgaaggagcacgtgctctttttgaagttggcgttgatatcgtcaaagttgggattggtcctggttccatctgtacgacacgtgttgttgcaggcgttggggttcctcaaattacagcgatttacgattgtgcaactgttgcgcgtgaatttggtaaaacaattatcgcagacggcggcattaaatactccggtgatatcgtgaaagctctagctgctggaggaaatgcggttatgctaggaagtatgcttgctggaacagacgaaagccctggtgaaacagaaattttccaaggtcgtcaattcaaaacttaccgtggtatgggtagtttggcagcgatggagcacggttcaaaagatcgttatttccaagcagatgcgaaaaaattggttcctgaaggtattgaaggtcgcgttccttacaaaggctccgttgctgatattatcttccaattagttggcggtattcgttcaggtatgggttacactggctctcctgatttaagacatcttcgtgaagaagcagcattcgttcgtatgactggcgctggactccgtgaaagccacccacatgatattcaaattacaaaagaagcaccaaactatagcatttcttaaggtcgaaaaagcaggaatctcttccaaaagaggtttctgcttttttatttctactataaaaataagaaagctgcgagaaaacacgaatttctccaaaaagcttcaattaaagtcataaaaccgctatactgtttctatagaggaggcgtgaaaaaagataatgatagagcaagcaagagctattttacagcaaaactttggttatcaagattttcggaatggacaagttgacgtcatttcgaaactttgcgcgggagaagatacgctagcaatcatgccaacgggcggcgggaagtcactttgttaccaaatcccagcacttctttttgacggtttgaccattgttgtttctccactaatttcacttatgaaggatcaggtagatgcgctagtctcagaggggattgcagctacttttattaatagtacactgactaatagagaaatagatattcgactggatgctgcattttcaggtgagttaaagatgctttacattgctccagaacgcattgaaacgccaggttttcagcgtttaattgagcaggtacctatttcattatttgcgatagatgaggcgcactgtatttcgcagtggggtcatgattttcgccctagctacctgacgctgtgcgatagtttggataaaatgaccagacgtccgctcgttatcgcgcttactgcgacagcgacgcaggctgtttcagacgatatttgccgattgctaaaaataggagcagattcagtcgttaaaactggattttccagagataatttggcttttcaagtagtgaaagggcaagataaagataagtatttgattgattatttaacaaaaaatgtaacggaatccggaattatttatgcttcgactcggaaagaagtagagcggctgcacactttcttgctaaaaaaaggtgttgaatctggtatgtatcatggcggaatgaccgatttagcacggaaagactggcaagagaagtttctatatgatgatattcgagtgattgtggcgacgaacgcgtttggaatgggaattaataaatctaatgtgcgttttgttattcattataatattccgcgcaatattgaagcgtactatcaagaggcgggtcgtgctgggcgagacggggttccaagtgattgtatcttgttgttttccccgcaagatagccgcatccagcagtttttaattgaacaatccgaaatggacgatgagcgcaaacaaaatgaattcgccaagctacgccaaatgacagggtatggttatacggaaatttgtttacagaaatacatcgtgcagtattttggagacgacgaggaaaactgcgagaaatgtagtaattgcttagatacaagggaagccacggacgttacaattttagcgcaacaagttttttcttgtataaaaagaatgggtgagcgttttgggaaagtattaattgccaaggttttgacaggttctgctgaccagaaagtgaaagattggcgctttgacgaactcagtacttatggattgatgaaagatgcttcccaaaaagatgtgttacaactaattgattaccttacagcagaaaaatatttacaaccaactgatagccaatttccttccttaaaactgacggatagagccgtttcggttttacgaggtgagctaaaagtggaaagaaaacaagcgaaacgggctgaaaaagttaaaatagatgtaaatagtgaccttttcgagaagttgcgggaagtgcggcgggaactggcagcaaaacacaaggtgccgccatatatcattttttcagatgaaacgttacgtgaaatgtgtgcatatatgccgcaaacggaagatgcactgcttgaagtcaaaggcattggtgcgatgaaacgcgataaatacggtgcagaattcttggctgtactgcaacaagaggcatcgaaataaaat

SEQ ID NO: 3677 - DNA, 2288 bp, Listeria monocytogenes 4b
  misc_feature (1)..(end): n can be any nucleotide: a,g,c or t/u
atcgcaaaaggcgaactagattatcgtaaattcactgaagaaatgcgtaactatgcgaaaaaagcagtaactgaaattaaacaaaacgataaaaaattccgtcacgataacattacttcacaaaaatgcccagactgcggtaagccgatgctaaaagtgaaaggcaaacgtggtacgatgctagtttgtcaggaccgtgaatgcggtcatcgtgaatctgtttcaagaacgacgaatgctcgttgccctaattgtcataaacgaatggaaatgcgcggcgaaggtgataaacaaatttttgtatgtgtttgtggacaccgggagaaactatctgccttccaacaacgtcgtgacaaacagaaaaataaaaatgtatccaaaacagatgtagctaaattcatgaaaaaacaaaacaagcaagaagatgagccgtttaacaatcctatggcagaagcgcttgccaaattaaagctagataaataagaatggacaaagcggcccactcatattgagtgggtcgctttgtttgacatagtctgtcgtatacgaaacaataaaagagcaatcaatactgaaaaggagatgtttcacgtgaaacataatcaattaattattgaaacggatgtcccagctgaaatgcgcgatggtgtaacgctttacgcagatatatatcgcccagcagacgcgggggaatatccagttttacttacaaggttaccttatagtaaatcatacgggcttcactttattcgtcctaatattttggcggagcaaggttatgttgttattgttcaagatgttcgtggcagatatacgtcagaaggagattttgttccatacatagcagaagttgacgatggatatgatacgattgagtgggctgcgaacctgccttatgctaacggaaatgtcggcatgtttggtttatcttattatggttatacgcaaattttagccgcaattagcgggaacaaacatttgaaagccattgctccaattatggctcaaaatagcatgacagatgtttttaatgaccacgacggcgctttagaacttggaatgtgggaaacttggaatctagagtccatgcttccaaacatgctagcccgtacttataaaacgcaagatgaattagaagaagcagtgaacacattaatgaaaaatctagacaatttagacgcactttatcaatttaaaccttataaagactggccagcaatcggtcaaaatgaaatgccttacttctctgagttattaaattatgaaccaacacataaccattggcaaaaaatcgatgcaaaaagcaattatgataaaattaatgtgccaggtctccatgtagcaggctggtatgactgctttttagataaaacaatcgctaattttcaaaatggtcacttgcgaggtcttggagataagctcatcattggtccatggacgcatgctaatttcactcagatgattggcgaccgtgattttggaatggcggccactaaatggggagaggcgaatatgcatgctagacatatagaatggttcaatcattggctgaaaaaagagcctttaccagcatcagcgcctgttaattattttgtgatggggttaaatgactggaaaacagctgaaaactggcctcctcaaaatgcaaatatgacaccattatattttaaaaatgaaaaagtgagcgcagaattcacacctcctacaacatcttcagaagcaaaatttagctatgatccagaaaatccagtaccatcaaacggtggagggaccttacataaggcactacatgcagatggacctcgtgaccaacaacaaattgaacttcgtgaagacgttctttgctactcaacggagccactaaaagaagcaatcgaagttaccggaccaattcaagtgaaactctgggccaaatcagatgcacctaacacggattttacagcgaaattagcggatgtatccccagatggaacggcttttaacttagccgatggcatcatccgggcggccaagcaacctggcgaccttgtgcaaaataatattaatgaatacactatccaccttcgggccacaagtattatccccaaaaggccatcctatcccccgtggactttggtgttaggtctttgcccccatgttgtcccaatcccatcgcgggcgtcgcttggtcgcttgcggctctccgccagtccgccggcggcgccgcctcgtcgggcgcgcccccccccgctgtttcgatctcgcccccgccccccccgtccctgtccgtccgtgccctctctcctttt

SEQ ID NO: 3678 - DNA, 3976 bp, Listeria monocytogenes 4b
  misc_feature (1)..(end): n can be any nucleotide: a,g,c or t/u
tcaacggtaaatttgaagcgaaacttttaaatcgagaaaaagtaattatttctcggcagtacgcgaaggttttaaagcaaaaattaaacatgggaggtaagcggaaatgagtactaaactaattcaatttatacaatcagcatgccttattttttctgcctctattatcacgatgatctgctcttacatcgcaactggagaatcagaaacggtcgcaatccgggatatttttattatgttaggttttagtattgtgacaacattcatacagcaattattatttaataactcagtgaaaacgaaacgtgctttttacagtcgtttgattgctttcttcctctttattggcgcagcaattttagggcttggttggttgctggattggtatcataacatagctgggtttatgattattttgggctttatttgtgtgactttccttgtaatgcatattttcttcagcttccgtgatgtgaaattcagtaatgaaattaatcaaaaactagcagaaatgcgagaaagggagacaaaatgataaaattgatcaatgtagttaaaaaatttggcaaaatcgaggctgtcaaaggtattaatttagaagttgaaaaaggctcgttatttgcttttctaggcgaaaatggtgcgggtaaatcaactacgcttagcatgatttgcacagaaagcgaaccaacttcgggagaaattttcattgatgatgaaaaattgacatttaaaaaccgtaaattatttagacaaaaactaggcgttgttttccaagaaaatgtgttggatgacttactcacggtgcgcgaaaatttatataatcgtgctagtttatatgggaaaacaaaagcagaaattacggaacgattagcgctagtttcttctattatgggcattgaggatattttaaatcggcgttttgaaaaattgtctggtggtcaaaaacgtcgcgcggaaattgctagggcaattatgcatgacccagaaattttgctgctagatgagccaacgaccggactggacccaaaaactagagtgagtgtatggaaaattattgattatttgcgagaagaattaggaatgacggtgtttttaacgacacattatttagaagaagccaaagatgcggatcagttggctgtaatccataaggggaaaatcatcgcgcaagggacaccagcaaacattagaagtcgtttttctgtagacaaaattttcttttacgatgcaaaagttgcagaacttcaaaaaataatgaaaaaaatgaatttaccatttaaagtgactaacagaacgatgcgtgtagatgtcatagatgaaaatgtcgaaatattggctattttaaatcaggctataggattttacgactcttttgaggtgattaaagggaacttagatgacgcttttatttcgatgattaaggaggactccaatgattagtcgtaatttaaaaatttattttcgtgatagaacagctgtatttatgtcattactaactgttttaattattattgggctgtatgcgatttttttaggaaataatatggaagagatgttcaaacaggcttctggaaaaacgatagggattcaagaattagtgaatacttgggtgattgcggggattttatccattacacctgtgacagtatcgttagctgttttttctttgaaagtacatgatgaagaattaagtattgcgagaagctttgcgataacaccagcttccagatggcgtattgttattagttatattgttagtggactagttgcttccttcttgttgtctgttgtaacactttttgttggagaaatgtatatttggttgactggcggagcatttttaccttttgagagctggattcgtttaattggggttattttaattaatgttctctgttgtagtagtatgatgttttttatcgccagtttggtgaaaaaagcgagtgcctttagctccgtttcgacgattgttgggactgttattggttttattgcagggatttatttacccattggttcacttccggctacggtgcaaactgcgatgaaatgttttcctttcacatacggagcttctaccattcgagaaatcatgacgaaagagccattacaacaagtttttgcaggtaatactcaggcgatggatgcaacaaaagaaatgattggaattacgatttattggagcgataaaacagttacaacagggcttagtttacttattttaagtgcctttgcagtcgtgtttggtgtattatctgtgatcctcatgaaacgacaaacaaaataatttttgaataaaaaatcagccgaaattctcctagttatgctatactaatggaatgtgaatgaatctaggaggaaaataacaatgagtcaagatttgcaaaaagaagttgcttcacgcaaaacgtttgcgattatttctcacccggatgctgggaaaacgacgattacggaacaattattattattcggtggcgttatccgttcagctgggactgtaaagggaaagaaatctggcaagtttgcgacaagtgactggatggaaattgaaaaacaacgtggtatctcggtaacgagttctgtgatgcagtttgattataatggttcaagaattaatattttggatacaccgggtcactcggatttcagtgaggatacgtaccggacattgatggcagtggatagtgcagttatggttatcgatgctgcgaaagggattgaagcccaaacgctaaaacttttcaaagtttgtcggatgcgcgggattccaatttttacttttattaataaaatggaccgtcaagggaaaatgccgcttgaattacttgctgaattagaagaagttcttggcattgaatcgtatccaatgaactggccaattggtatggggaaagagcttgctgggctttatgaccgctatcatcgtgtgattgaacaatatcgttcagaggaagatgagcgtttcttgccacttggtgaagatggtgatttgaaagaagcacatgctattcaaaaattactttattatgatcaagcattggaagaaattatgttacttgatgaggctggaaatgattttagccgggaacgtattattgccggtgaacaaacaccagtattctttggaagtgccttaactaattttggtgtagaaactttcttacgtacatttgttgattttgcgccatctccttcaagtcatgaatcgaatgagggcgtgattgaagctgataatccgaagttttctggctttattttcaaaatccaagcgaatatgaatcctgctcaccgggaccggattgcctttattcgaatttgttcaggcgaatttgaacgcggcatgaatgttacgttaacgcgaacgggcaaaagtatgaagcttgctaactcaacgcagtttatggcggatgaccgggaaactgttaatcgtgcggtagctggtgatattatcggtttgtacgacacgggaaattaccaaattggcgatacgattactaatggaagtaaaaaacttgaatttgaaaaacttccgcagtttaccccagaattatttatgcgtgtttatgcgaaaaatgttatgaaacaaaagcatttccataaaggcgtcgagcaacttgttcaagaaggtgcgattcaattatttaaaacgtggcgcacggaagaatacattattggggctgttggtcagttgcaatttgaagtattcgaacacagaatgcgtggcgaatataattcagaaattcggatggaaccaatcggcaaaaaaatcgctcgttgggtcaaagaagaagatgcggatgaaaaactatccaccgctcgaagtatgctcgtaaaagaccgcttcgaccaaccgttattcttatttgaaaatgaattcgcaattaattggtttaatgataaaaatccagatatcgaattaacttcattactataatagctgcaacctatttgtactttcgcaaataggttg

SEQ ID NO: 3679 - DNA, 2372 bp, Listeria monocytogenes 4b
  misc_feature (1)..(end): n can be any nucleotide: a,g,c or t/u
attccggtttggtatatgagacaagcagggagatctcaaccagaataccgcaaattaaaagaaaaatactctctatttgaaattactcatcagccagaaatatgtgcttacgtaaccaaattaccagtagatcaatatggtgttgatgcagccattttatacaaagatattatgacaccacttccggggatgggagtagacgttgaaatcaaatctggtattggtccagtcatacataatcctattagatctttccaagatgtagaaaaactgacaatgttcaaaccagaaatagaagttccttatgtcctagatacgataaaattattggcagatgatatgctagatgtacctttaattggctttgcaggtgcaccatttactttggctagctatatgatagaaggtggtccatcgaaaaattatcaccaaacaaaaagttttatgtatcgcgagccagaagtttgggcaatactaatggaaaaacttggtcgaatgactgcgaattatttaattgcgcaaattaatgcgggcacttctgcggtgcaattgtttgattcttgggtaggggcacttagtcgagctgactatgctgaatacattcgaccagtaatcgaaatgattgttagagaagtgaaagcagttcatccaacaaccccaattattatgcaagcagttggcgcgagtcatcttttagcagaatgggaaacaatgccgcttgatgttgttggcgtcgattggcgtgaaaccatcacaagtgctcggaaaaaagttccaacaaaagcaattcaaggaaatctggatccgtccacacttcttgcaccagagaaatgtttaaaagaagcaaatcgtattttgcaagaaggcgtactagaaccaggttatatttttaatttaggacatggcgttttcccggaagtaccaccagaaatgttgaagaaactaactaattacatccatgaacgtagcgaaattctattaaaaaaggatgatataaaatgactaaaaaagtaggtctacttgtaatggcatacgggacaccgtacaaagatgaagatattgaacgttactatacagatattcgtcatggtcataagccaagtgaagaaatgattgcggatttgcgcggaagataccatgcaattggtggattatctccactcgcaaaaattactgaagcacaagcctatggattagaaaaagcgttaaatgaatcgcaggacgaagtagaattcaaggcatatatcggtttaaaacatattgaaccttttattgaagacgctgtagaagctatgcataaagatggaatagaagaagcaatctcgattgttttagcgccacactactctagctttagcgtcgaagcttacaacaaaagagcaaaagatgcagctgataaactaggtggccttcgtatcaaagcaatcaatgattggtacaaacaacccaaatttattcaaatgtgggctgatagaattaacgaaacagcaaaacaaattccagctgatgaattattggatactgttttaattgtttccgcacacagtttaccggagaaaattaaacaacataatgacccgtacccagatcaactgcaagaaacagcagatttcattttcgaaaaagtagtagtacctcattacgcgttaggttggcaaagtgaagggaaaactggggagccgtggctcggacctgatgtacaagatttaacaagagaactttacggtcgagaaaaatataaacactttatctatacaccagttggatttgtggctgaacatttagaggttttatatgataatgattatgaatgtaaagtagttaccgatgaagtgggcgcgacttatcaccgaccaccaatgccaaactcggacccagaattcttagaagtattaaggacggttgtttgggaaaaatatagcaattaaataaagtacttgccgggatattcgttattccggcatatttttttaaaacaaagaaaacgttttcaatatttttagctaaatactatgaagttttaatcaaattctcatcttcaccgggcataatgataactatagaaagacaggaggttcacccaaatgaaaaacaaggcagaaaaacaaagaattgccactaatttgtcactttatatgaaaataaatggatacactcatagaacattcgcgcttgcagtcgggatttctcaaaacactttaaaagcattgatgattgggaaaatgagaaacgaaaataaattccaaaaatacatatcgcaaattacagaaagtttggcacttgaagaaaagttctttgaacaaccgaaagaagcgattacagcagcacctatcacttttcaagatacaaacaaaatgcatcttggagatgaa

SEQ ID NO: 3680 - DNA, 4182 bp, Listeria monocytogenes 4b
  misc_feature (1)..(end): n can be any nucleotide: a,g,c or t/u
tattctcatcccagcaatcattttatttatcctaggtattgcttatgttgctggcggaaatccccttcatgtcactttttccaaagaggcgtttatcccggatttctcaaaagcttcaacattagtcatcttcgtgtcatttatactcgcttacatgggtgttgaagcttccgcgagccacgtaaatgaaatgaccaatccaaaacgcgattatccactagcgatgattatgctcgttattttagccatcgcactgaatacaatcggcggcctaaccatttccgctgtgttacctttaaaagatttatcccttagctccggtgtcgtccaaacattccaagcattaattctgcactttggttccggcttaggatgggcagtaaaactgattgccatcatgattgcacttggcgtcatgggtgaagtcagtgcctgggtagtcggcccctcacgcggaatgtatactgcagcagaacaaggcttacttccagaaaaaatgaaaaaagtaaataaacacggtgtccctgttccacttattatggttcaaggcgtcgtcgttaccatttgggcagctattctcacattcggcggcggcggaaataatttatcattcctaactgccatttccttaaccgtagtcatttatttagtcggctatttactctttttcatcggctacttagtacttattttcaaaaaatcaagcttaaaacgcacctatcaaatccctggtggcaaaattgttaaagtgattgtagcgctaatcggcttagtaacatccgttttcgctttatgtatctcttttgttccaccagcatccatcgccgcaaaaagcgacacgacatacatggttatcttatcaatcagctttatcgtcaccgtactaattccatttatcatctacgctgtgcacgataaaaaagacatctcaccgaaagatattacacatttagaatcaagcgacatcaataaattcacccacccaagagctcgtggcgaacacattattaaccccgacgaaaaacatattatgaatcaagacaaattataggaggaaaaaatcatgttatatagtaaagaaaataaagaaagttatttagaaccagttttcggatcaagtgcagaggatcgtgatattcctaaatacaccctcggaaaagaaccactcgaacctcggattgcctatcgtttagtaaaagacgaacttttagatgaaggttctgcccgtcaaaacttagctactttttgccaaacatatatggaagacgaagcaaccaaattaatgtccgaaacactagaaaaaaatgcaatcgataaatctgaatacccaagaacagctgaacttgaaaatcgttgcgtcaatattatcgctgacttatggcatgcacctaaggaccaaaaattcatgggaacttccacaatcggctctagtgaagcgtgtatgctgggcggaatggcaatgaaatttgcttggagaaaacgtgcggaaaaacttggcttagatatttatgcgcaaaaaccaaacctcgttatctcctctggctaccaagtgtgctgggaaaaattctgtgtctactgggatatcgatatgcgcgttgttccaatggataaagatcacatgcaactgaataccgaccaagtccttgattacgtcgacgaatatacaatcggcgttgtcggcatcctcggcatcacttacacaggccgctacgatgacatctacgcacttaacgaaaaattagaagaatacaatagcaaaacagattataaagtctacattcacgttgacgcagctagtggtggcttcttcactccatttgtcgaacccgatattatctgggacttccgcttgaaaaacgttatctccattaatacttctggtcacaaatacggcctcgtttatcctggtatcggttgggtcctttggaaagatgaaagctacctaccagaagaacttatttttaaagtcagctaccttggcggagaaatgccaaccatgcaaatcaatttctcccgcagtgcgagccacatcatcggtcaatactacaatttcttacgctacggcttcgaaggctaccgcaccattcatcaaaaaacaagcgatgtagcacaataccttgcccatgcagtcgaacaaaccggctactttgacatttataacgacggctcccatttaccaatcgtctgctataaattaaaagacgacgctaacgtaaaatggacattatatgatttagcggaccgcctccaaatgcgcggctggcaagttcccgcatacccactaccaaaaaacttagaaaacatcatcatccaacgttacgtctgccgcgctgacctcggtttcaacatggcagaagaattcatccaagatttccaagcctctattcaagaactaaacaacgctcacatcctcttccatgatacccaacaatccggcgtccacggcttcacacattaataaaaaggctagcctctcaaataggctagccttttttcatgttcttttattctaagcgactgaatcgccctttctacatctacaagatctctgtcaaaaaaagccaaggaaatcggaataatcatcccatctaccgcttcctttaattccatttcacagttcggatgacaaagcacaatcgttggctcacttgactccgctaaaacctggttcaactcctccaccgaattaaacatcgtctcatgcaccgtcaccttccgccccagctcttgctccacctgaaacttacacgactcgaaattaattaaattaaaggaaaaaatacaaatttgcaccggattgttccatttataaatcagtggatacaaatgaatcgtcaaataattaatgtgcgaatcaattaataatactcgatattcactagcctcattccagcgctccaaaacatttttcacaaccatataaagtggctcatactttttatccagtaatcgctcattactcggaataagtccctgcaaattaaacaacgtcttcttcaaaaagtaacaaagtgccgcccgaaaaagcgaatgattaacaacctccggaccaaaatattcctcaaataaatcaatcaaaacttgcaaatctgcatttttcattatcaactcattaaactgctccaactccacctttttcatggaagcatcaatgatactaaaattagtcgaataataaatcagcattaaatacaagtaatcattatatgaaaattcctgaccaagctctttttcaagtgtttccttactacttttccgaaccatagcaagaaagcttgaagactcaatatatttttgacactgttcatccaatataattgcactagtcggaatatccctcttaaacaccatcgaaatcagcgaccgaaaatacgcatgcccttccgcattatgcgccaacgtatcaatattaatccgcaaattcaacgtcgccataaagtcatcaatcatttgcttctcctcatccaaaagtggataaataagcacaccatattctgcttgaagaagcgcaatcaaataccgaaccctgtattccttcccagtaattcgattattatcaagtgtcaaatcaatttctcgaagaaacgcttctaccttgtgcttcaaccgatacgcatgcgaatgagaaataaaatacgtatccataaaatctgtgaatttgcgctcctccacattcgtaacaaaaaacgccacacatttcaaaaacatcgagttatcatataacttatacaaaactttccgttccgtcgccccattttgcaaccgacattggtatacccaattatccacacattctttcatctgaataacaatcaagccatccaattcctcattcaacgcatgaatatccgaccttaccgtcacccgagaagtctccatatattccgcaatttcatctaaattcgtatgtttattctttagtagaaaatcacaaatcaaacattttctcttaatatccttttcgatataatttgtaagcataactatcctctccgtgaaagattaatacacaacaattttcgccttcttaacatgttaatttaatcacataaaattgcaacttctcactatataaatttttttaagtagagttatatcattaattttttgtaagtggtataacatgtcattaaactccgtcaaaaggtccttttgatcaagaaaagtaatatttccattttt

SEQ ID NO: 3681 - DNA, 1801 bp, Listeria monocytogenes 4b
  misc_feature (1)..(end): n can be any nucleotide: a,g,c or t/u
attcttccataacggaagcttcagtcgcactttcatcagccccttggccaccactaacaatcactttcgcctttggatattcgtttaaataagcgactgccgcatccaatctttcttgcaaaactaatgaaggaactgctggggtcccattcacttttgcacctaaaatcaacactgtatcagcattttcacttggtttcgtcctagaaccactaaacataaaggccgcgacgattaataaatacataaaaccaattatgattaaaataatgacaattttcctcagacttctcatctagttcgtcctccctacttcttaattaatagcttagcagaagattttaaataaaagagaaagaaataatcaagttaagggaaatttaaaaaacaccccgaaacagttttgaggtgtttttgcattattagttctactaaaaatactcacatgtgattgattctattcagtattatcataaattctccggcttttttaaatatatcgcatacataattaaagataaaatacttgctgacaccgcgatgagaaatgctggttctactaattcagagacataagtagctataatactaaaggtgaatgaatcaaatccaaataatggccgaactgccaaattaagtaaacctaaaaccaatattaaaattcctataaatggtacaattctatttttacctcgctgaaattttggaataaatatagtacacaaaaatcccaaatatcccacaatgatgattggttgcatccaaattaatttataagcaggctcatatactaattcaaatgttgctgcatctatcccgctagccatccacgggaacaacaaacaaattactgctattaaaaaaaatgcaatgcttaataatctatacataagcaaacctcctcccttggtacatattagcataaaaagttaatgtataaaaaaactgctcaagaatggcttttcttcgttttaaataagcaaaaaaattttttttatagtaattattacactttatgtgttgaatttgctctttttagataaattccacacctatatgtggtcgttattcaaaaattattcagtttgtaaatcaaacagcaaaaagcgccataaaacattcatttaatactattcatttatcattttttattaattttagtagtaaagaaaaaattacatttgaatggatatgtatatttattcaatccacatgattattctaaaatcgtaattattttcttgactccatcgtttagcatccaaataaaaaagtgatacaaacagcttaaaaaagcagtttgtatcacttctcagtttccataaaatatggagatggtgggagtcgaacccacgtccagaaatatcggcacttaaatatctacgagcgtagtcaccgtattagcatttcgcataaacatcggcccggtaacaggcttccattcagctagtctgattaagctcttctatttaaccccagacggagattaactagtgtagcccacttagagtgagacccttaccgtagcacatgggcgatgcacggaggatcagctatgctactgcttattaggcagcgaaagctaggttttgtttttctttgccagttattattggctttgacgttgataacgaggacgatccccccgactcgcaactcaagctcgaactatccctgtcgaatccgtaacatccccagagttaaagtctaacagtagttattatacatgaaaaaacgaggctttacaaacagaaaaaacttgtgacatagccaaatgcgcaactattatttagcatgtcac

SEQ ID NO: 3682 - DNA, 3222 bp, Listeria monocytogenes 4b
  misc_feature (1)..(end): n can be any nucleotide: a,g,c or t/u
cctaagggccacctagatcgctgcttgagcggccgccactgtgctggaaagtttgattgattttacggcagatttagacgttacaagtgatatgacgaaacatatttttattgcgctggaacgtgccaaacgcggaattgtcattaaaaatcaagtgacgcatatcattacgcagcagtatagctacttactggatatcgcgattttcattggagaaaaattacttgaacgtctaggtgtaattttaaatcaagaagaaattattttattggttatgtatttataccaatactaccgaaaaatcgaagcgaagcaccaattaaatcaagtagtgcgcatagctttaattgttttagaaggtaaggctgcgatgtattacttgcgtgaacaattagccgaagtattacgaccagtaaacgctgaagttatagaaataaccgataattcccagtgccaattactgttagctgaaaatatcgatgttgatttatgtatttctactaaaaaaattgatttgcctgcggaagttccgtgtattattttggctaataacatcggtttgattgaagaagtaacaataaaaaaacaactttcagccacagtagaagcaaataaaatgaaaaaatttgcttatattaaagaaaaatatttacacgaagagcttttcttaacggattatgcgtatgagcaaaaatataatgcgatcgaatttttaagtcaatattgcattgataaagaatatgttccagagcggtttactgagaaattatataatcgtgaacaactattttcaacagcgattccgactgggattgccttaccccatccaattaaaaatgtggcgcgcaaaagtggtattttcatttgcattttgaaaaaaccgtgtgcttgggatacacataaagttagtttgattatgattccaatgattgaagaattggacgggacagaggcacctttaattaatgattttttatcactaatagcttctaataagtcctatgtagagcaaataagtgcatgtagtacctatcgcgaatgcgtggaattattacaaactatatataataacaacgagtaagtttgaaggagtgagaggtatgaaaaaacaaattattactattgctggcggaggaagtacttatacaccgggaatcattcaagctgtacttaacgggcaagaacgattaccagtaagtgaaatccgtttgtatgatattgaagcaacaagaaatgaaaatatgtatttaattctggattatatgctagaacaacaaggcttttcatcaattaaattagtacaaacaaccaatcctgaagaagcatttactggggcagactttatcttttcgcaaattcgcgttggcggacttaaaatgcgcgataaagatgaaaaaatcccactaaagcatggattagtcggacaagaaacatgtggacttggcggattttcttacggtttacgtagtattggcccactgttagaattagttggctttattcaaaaatatgcgccagaagcttggattttaaattatacgaacccagaaacgattatttctgaagctgtacgaagacaatttcctggtattcgaatgattaatgtatgtgatatgacaatcggaattgaagatacactagctaaaaattatggctatgaccgtgataattggattgctacttactatggtttaaatcactttggttggtatacgaaaatttatgataagtcattaaaacgtgatattatgccagagcttttagagaagttgaaagtccaagaaatcaaagaagaagacccaagttggaatcgcgcattcaatatgatacgctttatggttcaaaattttccggataacttgccaaacaactatttagagtattatttgtatccagatatgtatgtcgattacgctgatccaaattatacccgcgcgaatacagtaatggatggtcgtgagcaaaaaacacaagaaatggcagataaaatccgcaacaaagaaaaaggagatgtgcttgatttctactttggtgtacacggcttatatattgtagacatagctacttcgctactaaatgatgagaaaagtcgctttatgttaatcgttgaaaacaaaggatccatcccgaatttacgtagtgatgcagttgttgaagttccagcatacgttggtgcgacaggtgtagaagcaattgccttgcctgcaattggtgatttccataaaggtatgatggaagcgcaagttgctgcggagaaactactcgtagatgcgtactttgaaaaatcttatcaaaaagcattacaagcatttacattaaatcaatcggttccaaatgccacagtggcgaagaaagtattggatgaaatgatgattgaaaataaagcattttggccagaattaaaataagtatcaaacatcgtatgacggatgaaagttcgctatacgatgttttttgttatccaaccgggcgccttccctgcaaagaaatgctataattaaactattaacatacgaaaagaggtattgcatgacgaaaaaaatagtatttgtagatgtagatggtacgcttgtaacggatgatgggcttgttccagtatctgccaaaaccgcgataataaaagctagaaacaatggtcaccaagtctatctgtgcactggtcgttctaaaccagagctgtatgactcgattttatcgatcgggtttgatgggattattggtgcaggtggcggctatatcgaagtagacgatgaaattatttaccataaaaaagtagcgaatgaagatgttgttcatatggtagatttctttcatgaaaagaacttagatttctatttggagtctaacggggggctatttgcaagcgaaaatctagaagctcatttagacagcttagtttatggcgatgtcgaaaatgacccaattgcgcgcgagaaaaaagccaataatccgcatcctttcatgacaagcctaacttacggtgaaacaaatctttaccgcacagatgtcaataaagcttgtttcctagaaaataaaaatgtaccttttgaagaaataaaaaatgaatttagtggcaaatttgaagttttacattgcacagttcctatttttggggacgatagtggagagctgatggtgccagatattcataaagcaacagcgattgaatttctactagcgcatatcggtgcagagaagaacacgacgaaaggcattggtgat

SEQ ID NO: 3683 - DNA, 3665 bp, Listeria monocytogenes 4b
  misc_feature (1)..(end): n can be any nucleotide: a,g,c or t/u
actagctgatattaaaggcattcgtggagaaattagtagaagaacttcaaatccgtttagccgaccaagaaattaccattactatttccgataatgcaaaagcatttattgcggaagaagcatatgatccggtatatggcgcacgaccacttaaacgctatattgtgcgtcatgttgaaacgccacttgctagagaaattgtatcaggtaaaatcatgccacattcatctgtagaaattgatttagcagataaagaatttacttttaaagtcacagaataacatagaaaaggtttgacacctcgcttgaaagggaaaactttggttggattagtcgtttagaaaatagacgaaaatggaaggatgaggaagatgaaattagtattaattcgtcatggtcaaagtgaatggaacaaattgaatttatttacaggttggcatgatgttgacttgtcacaagaaggcgttgtagaagcaatgactgcaggaaaaagaattaaagaagcgggcttagaattcgatgttgccttcacttctgttttaacgcgagctattaaaacacttaattatgtgttagaagaatctgaccaaatgtgggtaccagttcataaatcttggcgcttgaacgaacggcattatggcgcacttcaaggtcttaacaaacaagaaactgctgaaaaatatggtgctgaccaagtacaaaaatggcgcagaagctatgacactcttccaccgttattagaagaaaacgacgaaagacaagccaaaaatgatcgccgttatcaactccttgatacacacgctattccggcaggtgaaaacttgaaagtaacattagaacgcgttattccttattggatggacacgattgctccagaaattaaagaaggacggcgagtagtcatcgcggcgcatggtaacagtttacgagcattagtgaaatttctagaaggtattggcgatgatgaaataatggatttagaaattccgacaggcgtgccactagtatatgaattaaacgatgatttaaaaccagtaaataaatattacttggataaataaaaaagaagctctttccaatatattggaaagagcttctttttttgaactgcacctgaaaagtcagttctcgctatcagaaagttggatgtttacttaaagtcataaacttcgctatctttaggcatcaagaaagtgattaaaataatgaagaaggataaccctactgttaaaataatagcccgcgtcatatcaaatgatacatataacatggaagaaagaacgaattctgccattaaagaaagtaagaatacccaaactacagttaccacataacgcatccttacaccccatttcatctatttcattatacattttagcacataaaattagattatccaatcatatatcatttgaaaatacgattatcaaaaaatggaaggaaatgaactttaaatggagaatagtagtgtaaaggggtaaataagcaatgacataatattgtcaaatgtaaataggtgcacaggaaccctctatactagccattctgcttactttattataaatctttcatcaaaaaattagtaggctctcagaatgaaaatgctagaatgaagaaggttaacagagacagagccatttaaattgggggaactaactaatttggataggaagtgccaactgataatgaaaaagaaattcacgcagattttactagcaagcgtcatcgtaagttctacactagtaccttttgttcaagcggaggcagcaggaacgagccaaacttcagtaagtcacgcaggaatgactttatcacaacaacaatttatacaatccatagcaaatgatgcacaagatctacaaaaagaagaaaaaatattgacgagtgtcactttagcacaagctattctagaatccaattggggtaaaagtggcttatcaacttcagctaacaacctgtttggaattaaaggaagctatgaaggaaattccgtttcaatgggaacgcaagaatttagcagcgggaaagcctaccgcacacaagctgatttcagaaagtatccagacaaaaaagcatctttagtcgatcatgcccaactttttgttaatggagtatctggtaatgcaaatctttactcagcggtcatcggagaaacaaactataaggaagcagcatacgcaattcaagatgcaggttatgcaactgacccagcatacgcagaaaaactcatttcaactattgaaaattacaatttggatcaatatgaccaaatttacgatacagtgacatcaacagaaaaccaattagcatatgcggaaattaaagattctagcaatgaaacaatttggacaaaaccatataatacagagggtgcagaaaaaacaggtagtgtcaaagattacaaaaataaaagccttcgaatttctcaaaaagctgtcacagaaaaaggaacatggtatcagcttctaaatcaaggcgaaactattggatgggtaaacagtaatgctgtagaagttttttataccccgaaaaatgaaacaaatgtgaaactagataaatatatcaccgattcggatcaaaaaatctatgcttacccagtagaagataattcaaaagtagtcacaaatcttaatgattatctagggaaagaattagatattgaccgtcgtgcagatgtgaaaaatgaatattggtaccgtattaagtcagacgatgggaaagtaattggctggtcaaaagcagacggttttgctgaaaacaatcctaataaagcgttagaagtaaaataaaaaagtagcaatccaattgcttaattgatagttctctgttaaaattagcaccaggtcataaaaataaccaggagaaaatttattttcaccctgatgtagtttgatatggaggagaacacatgaacgcaggaattttaggagtaggtaaatacgtacctgaaaaaatagtaactaactttgatttagaaaaaattatggatacatctgatgagtggattagaactcgaactggtattgaggaaagaagaattgctcgtgatgacgaatatacgcatgatttagcatatgaagcagcaaaggtagccattaagaatgctggtcttacaccagatgatattgacttgtttatcgttgcaactgttacacaagaagcgacatttccttcagttgctaatattatccaagaccgcttaggagcaaaaaacgctgctggtatggacgttgaggcagcttgtgctggtttcacttttggagtagtgactgcagcacaattcattaaaacaggtgcatataaaaatatcgtggttgtcggtgcggataaattatctaaaatcactaactgggatgatcgcacaacagcagtattattcggtgatggagcaggtgctgtagttatggggccagtttctgatgatcatggtttactttcatttgacttaggttcagatggatcaggtggtaaatacttgaatttagatgaaaataaaaagatttatatgaacggtcgtgaagtattccgctttgcagttcgccaaatgggagaagcttcactacgagtacttgaacgtgctggtcttgagaaagaagacttggacttactaattcctcaccaagcaaatattcgtattatggaagcttctcgtgagcgtttgaatt

SEQ ID NO: 3684 - DNA, 3084 bp, Listeria monocytogenes 4b
  misc_feature (1)..(end): n can be any nucleotide: a,g,c or t/u
gtgctggaaattcatctatctttgtgagtttgttcgtgtcgcaatttaagtaggttaattttgtaagcggggttacatcaaggtttgtaagtttatttgaatcacatgccagataagttaaattagtgttttggctaagatcaagagtagtaatgttattatacgtgcaaattaattttgttaaaccagttaatttttcaataccagtcatatcggctatggaagaattgtggcaatctaggcttgttagagtagcaagttgttcttcgctgatagtgtcagttgcttgcatttcaaatgctgctgctacctctgaagcaaaattgtcatcaggaaaccagtcgttaaaactttgtgtttgaccagctttgagtgtgtttttaatagttggttgagttgggcttgtttctttatcagtagtgatttctgttgtattatcaatcacatcattcgttgctgcgaatgttaaaattgggtttgaaaccagggttaaactaactaatgaagctattattattttagaagttttcaatttggcgcactccttattcgttttctacaatcatttattatacgccgttttatttatcattttgtctcgcaaaagtacaaaaattccggatatatgtgactcgattgtgtcggtttaatgactaaaacaatcataaaaactgatagcgattaattttcacgactatgataatataaaagtgtccgattaagttaaacgaaggggtgaatcgagtgtctcatttaaaagattatacgattggtattcaacatataaagcagctgacgtcggaaatatcacttggaactaaattggtatttgctatttctggacaaataacaatcaaggtttctgagcaaaaattttacttgcaggaaggcgatgttttagttcttgatcgcaataccttttatacaattgagggaaatgaagataatttatttattaatttaacgatttcagatacattttttgcgcattattatgaggattattttcagcattcttttaaatttttctcgaaggagagtgaccctgggagagagcgggttgttgggtctttgaggaagtcggtgagtgagcttttgattgcttcggcgacgaagaaacgagcgaataaattagaagcgcaatcggcgttgttccaaattttattattacttacgcgttttttgaaaaaaggaattccatcttctgctaggaaagaagtcaatgataaacggatttcgcgcattattcgagaagtggaagagcggtttgatgaagccttgtcgcttcgtgagtttgcgcaaaaagagtttttaagtgaggcgtacttatcacgttattttaaaaagacgacggggcttggttttttacagtatttgacagaagtccgattgaagcatgcgattcaagatttactacattcggcggaaagtattacagagattgcgttaaaaaatggtttttcgagccaaaagcatttttcagaagtatttaagtttcattttgagctaacgccaagtgaataccgagcggaacatcatgtggaaacgaatttgttaatagacaataagacatctgagctgggcgctagtatagaacaaattgtgccatctccggaaattttagtgaaattgtcacgactttatcatgatgtggagccgggtaaggaattaaataaagcaccatttgagaaaaagaaaattgatatcacggaaaagaccgaacgttgtttaagtgagaatatgaatattttgacgattggtgagcttaaagaagtgcttaaagataatgtccaaaagcagattattacgacgcgtgatgagattgggattaattatattggtattcgtcatttgtttagaggttcgacgttcttgcctgaaacggaaacggacgaattagtgccaacttcttctccatatgcgaatgcggatttagcgctcacttttttaaaacagcaaaatttacaattgtttattcgcttggagtatcaagatattgtaggcgatgaggcggctgtttttgaacgattggatcactttttaaagcattgtatgcaggtttttgggcgggaatttgtttcaaaatggcattttatgttttttgaaccgaaaaatacatatgctgataaggaagaactgaaaaaactttatttgaaaatatatcacactataaaatcgcgttttccagctatccaagtcggaaattttgtcccattttcattgtctaaaaatgcagtgcctgaacgacatacgtggtttttagaagaagcggataaaatggactttgtcgcctataatgcgaatcaaaatgaagcggtagatttttcgaaagaggatatgaagtcgttttcgatttcagaggattattgtttgtcaaaaacgcttcaattaaaggctttcttgaaacatcatcatatcaataagccgctaatgttagtaaactggaacacattatctgggaatacgagatacacaaacgggacttttttcagaggagcattagttttgaaaacgatgctagatttggtaccagaagtggatgcattgggcttttggattaatacggaacttcacgaaggggacgatagcaaattaaatattagtcttgatggaattgaaatgttccactttttcaatggtaaacgaccggcgttttatgctgtgaagtttttgagaaggcttaagggtgttgtggttgctaagggtgaagattatattatgacgaagcacgcagacggttatcagcttattttgatgaactgtgcgacgattaatccgcgttattctgtggaggaaaggttcattaaggaagaacaaaaagaagtgcatattagacttacagggcttcacgcgggtgattatcaagctgtaaatggcaattcgaccgtgacaatggggcactttattcgaagtattggcaactgaacagtaagtatgggctagataaagagattttggactatattgtggatgcctctcagcctacacttacggtgagtgatgaaacgattacggaagattggtcgttttatgcttatttagatattaatgcgattcatttttatgagtttagaagtacggttt

SEQ ID NO: 3685 - DNA, 3359 bp, Listeria monocytogenes 4b
  misc_feature (1)..(end): n can be any nucleotide: a,g,c or t/u
tcgaaagcggactcgcagaacgctatccaggtggcgtgtcactaccagttttaaaacctcaaatagaaagctatacaagtagattagtaaaacaaagtgaacagaaaaagaaaattgcttatgcagcaggtaaagtgataaaagatcatatgacaatctatttagatgtttcgaccactgttcattttttggcttcaaaccttgagcaacatgatttagtagtagtaacgaattcgatggataatgccatagctgcatctcagaaagaagcgaacaaagtatatttgctcggtggttttttcaacttccattcgcgtgtattatccggtgagcccgttttaggtcaacttcagcaatttaacttcgatgttgcttttattggaggggctggactaacggaagatggcatcttttattcagaacttacagatgtttacatgaaacaagagattatcaggaattccgaaaaagtatttttactaattgatagtacaaaagtaaataaaaagacagcttccaaaattgatttttctggaattgatgccgtaataacagatcagcctttaccaaaagatttaatgcagtgccttatttctaaagaagtagaagttatatctttgaaaggattgtgaaaataatggccgttatcaaaaatgtgaaaatttacaaagaaaatgaattaattgatgcagcagttattacagaaggaaatttgataaaagaagtttgctcaactactcctgaaaagtattcagatgagccaacttttgatggaaatggacagttgctaattcccggaatgatcgacgttcatattcatggggcaaataattatgatatgatggatggctcaacagaaagcatccaagctgtttcgatggcttgtgcggaaaccggatgtactagtttcttagtcacctcggttagttcttcttttgaagacttgatccaaatgattaagcaaactaaaaaagtcattggaaaagagagaggtgccaaaattgcaggaattcatttagaaggcccctaccttaatatagaaaaaaaaggaatgcaaaatccagcctatttaagacaccccgatttaaaagaaatgaaaaagatcttcgatgaagcagatggtctgataaaaatggtcacaattgctccagaattgcctgggggtatcgaactcattgacttcttgaaaaaaagaggagttgtggtcgccattgcacattccaatgcaacttatgaagaggcgcaaaatgctttcgaacaaggagcaacccacatcacacattgcttcaatgctatgccagccattcatcaccgggcaccaggacttgttacagcagccttggaaaataattcggtaagcgttcaagccattgtagacggtgtccatctccatcccggaatcgtgcgccttattcacaaaattaaaggaccagataaaatggttctcacaaccgatgcccttcaagcaatgggagttggcgacggggagtatatttttggcggtcaccaagtaacggttaaggaaggcatagctcgcttaaaagacgggacattagcttcaagtaccgtgacgatgaataaatccttaaagttaagtaatgaatttgggattcacttacaagacgctattcaaatggcagcaagtacgccggcagacattttaggaatgaacaattttggtcgaatcgaaaaaggctatgtcgctgatttagttttacttgataaaaattttgaagttctaactacatggattgatggtgaaatatattaaatcgactggataaatactttcagaggagtggattataaaatatgccattatttaaacacgagggaacttactttaactatgaaatccaaggtgaaggcataccatttttatttcttcatggattaggtgataatttaaaatttgcttatgaaacatttgataaagatgagaaaatccaattaatttcattggatcaaagaggccatggaaaaagcggaaacgattccagaaaacttagctacgacaggttggccaaggacgcattagcgttaatggattatttaggaatacagcatttttttgtcggaggattatctatgggggctggcgttgccgtgaatttggccgtccaagcagccgataaagtgctgggccttataatacttaggagttctgcaacagatgaaccgatgaaaaaagaagtgatagcatggtttagtaccgtaagtaagtatttgcctaaaaaagatggtgccctattattggagcaagatccgatttttccatcgataaaagagacctatcctaaagcaattgatacgtttaagcgctattttgaagatgacgccgctgttacccactataaaaagtttagcgacatacctaaagatagaccaataaaaaacaaaagtgagttgactaatttaacaatccctactcttatactcgcaaataactatgatgtaattcatccaatcgaatacagtttgttttataaacgtaatattgaaaatgcaagttattatgaactaacacctaaaaccattgatgcagaaaaacataaactggaaataacgacttatataaatacatttatcattaatacatcaaaaaaaacaaattataagtaatccaaaatgatattttagttgtcatttcataaagcaataaagaagcagaaatcttgtatattccattttcaaaatggcttttatacaatgatttctgcttatttgttatttcacaggcggattcgaaacaatcgccgtcatttttccatcaatttcccaagattttacatcattcggcaatacaaaatgatcgccttttttaatcgattgttttgttccatcaatcgtaagtaccgcttctccgtctaaaacactcactaacgtataaggagctttagccatgaattcagccgcgccgtccacttcccatttgtatacgctaaagaaatcattcgatacaaaagtagtttcagtcaacccaccacgtgtttctgttttaatatctaacttcgcatccacatgcggtgcagtcgtaacgtcaatagctttatccaaatgaagttcgcgcaagtttccttctgcgtctttacggtcatagtcatatacacgataagtagtatcagagctttgttgtgtttcaagcactaacgtccccgtgcctaacgcatgaattgtaccacttggaacataataaaattcacctggtttaatcgccactttacgaagcaatttatcccattcgccgttttttgcccaagtagcgaattcttctttgctagctgctttgtgtccatatattaattccgcacccggagcgcagtcaataatataccagcattctgttttgccaagttccc

SEQ ID NO: 3686 - DNA, 2232 bp, Listeria monocytogenes 4b; identical to SEQ ID NO: 1984
  misc_feature (1)..(end): n can be any nucleotide: a,g,c or t/u

SEQ ID NO: 3687 - DNA, 3433 bp, Listeria monocytogenes 4b
  misc_feature (1)..(end): n can be any nucleotide: a,g,c or t/u
ttgttttaatggatattaatatgccaactgtcaacggactagatgcaactgaaatgctagtacgtcaatttcctagcatcaaagtaatcgtcttgactattcatgatacagatgaatatgtaacagaagcgcttagagctggagcagtcggttatttattaaaagaaatggatgcccatgaacttgtagaagctgtaaaaattgttgataatggaggcgcgtatattcatccacgtgtagcgattaaattaattcgtgaataccgccatttagcaagcactaacacttctcaaggtgtttatggctaccaacaacctgaagtcaaaatgccactacacatcttaacgcatagagagtgcgaggtattgcaacttcttaccgatggaaaaagtaaccgcggaattggggagacacttttcattagtgaaaaaacagtaaaaaaccatgtaagtagtattttacaaaaaatgaaagtgaatgataggactcaagcggtggtaacggcaatcaagcacggctgggtatatattcgctaaagaaatatcagggggactatatgaacgaaaaaatagcagtggttactgacagcacaacttatttgccaaatgaagtgaaagagcagctacgaattaatgtcgtgccactttctgtaataattgacggaaaatcttatcgtgaaggtgaggagttatctgcggctgatttttacagaaaagtaaaagaagctgagaatttcccaacttcctctcaacctgccccaggagatttcattcacttgttcgaacagctgaaagaacaaggttttgatactgtaattagtattcatctatcaagcggtattagtggaacgtttcagaatgcggcttcagcaggagagttaattgaggggctaaatgtcgtcgcttatgattctgagctttcttgcatggcgcaaggaatgtttgtagttaaagcagctgaaatggctttggcaaatgagccgctggaccagattatccaaaaactagataaaataaaacaggcacaagatgcttattttatggtagatgatttaaataatttacagcgtggcggccgtttgaatggagcacaagcccttgttggtagcttgcttcaaattaaaccgattcttcattttaatgataaacaaattgtcctctttgaaaaggttagaacgcaaaaaaaggcattgaaacgaattgaagatattcttcaaaaagccgttcaaaacaaaacggcagaaaaagcttatgtcattcatggcaatgatctagcgaagggtgaagcatggcttgcacaactagaagcgaaattcccagaagtaacatttgtaattaagttattttggtccagtcattggaactcacttgggtgaaggtgcgcttggcttaacttggtcaataaaataaaaaatctccagtttaaagctggattatttttttcggggggactaaatttgttttttcagtagttttggatggcaaaaatactcgttttcgtctaaaagaaatacttgtttcttttataagtatgcggtcgaaaacaaggatttcgtttctgcaataaaaaaagaaaaagtgtataactaaggggaggtgaatacagatggacatcttcccgggaaggctttatcaagaacgtgaaatagagagtaaagagggcttaagagaagtagtagcaatagaatcaaacaaatgctttcgatgtggaaatacggatgtgcagttatttggcaaaatgtcctgtgcattatgtaagagagaggattgtatttattgcagaaattgcattgtgatgggacgagtaaatagttgccaaaaattatactatcaacatgctaggttattactagagacaaaggaagtattattgaggtgggaaggagctttgtcagcgggacagcgaaaagcatccaacgcgatagtcgttaatttaaaagcaaaaacggatatgttgctatgggcagttgccggatctggaaaaacggagatgatgtttgaaggaatggactgggctttgcgacaaggctttagaatttgtgttgcttctccgagagtggatgtttgtttagagcttcttccacgtttaaaagaagctttccctagcatagatattgtttgtctatatggagactcaaaagataactaccaaggagagcagttcgtgatagcgacgacccatcagcttattcgcttttatgaagcgtttcaagttatttttattgatgaagtagatgcatttccttatgcgaaagatccttttttagaatatgccgttatgaaagccagaacaaaagaagggtgggcaataataatcacagcaaccccagagaaaaagtggcaagaagagtgtgtaagaggaaaacgtaattttgtgaaaattcccggacgatatcaccgaaagaaactgcctgtgccgagaacgtgctggattggcccgtggaaaaagaatctagctaaagggaaaataactcctaagcttatccagtggatgaatgatgtgaagaagaaagatcagccggctttaattttctttccagaaattgatgctatgaataaatttgcaaatgcacttgaaaataaaggctatgccagcccagtgacagttcattcagccgatgaattgcgtaaagagaaagtggaatggctacgaaaagggaaaatcaagctgttattaacaactacaattttagagagaggtgttacttttacagatgtgcaagtagcggtgtttggaagtgaagctcgtatttttacggaagctgctttagttcaaatttcaggaagggcaggtaggaaattatctcatccgactggagacgtttgcttttttcattacggtaaaacaatagaaatgaagcaagctatctcccacattcaaaaaatgaatcaacaaggagtgatagaagggatgctagatgactaattgcttactttgttttcaaccagttaggcaaagcgccagttgggaaataagttggttatttgaacctttgccaatttgttgtgatgcatgcttagcgggatttgaaaaactaactggcttactatgtaaaaattgtagtaaagaatccttagatgatgtctgcgaggattgccgaagtagaacacattttttagatagtaataaatccatttatcgttacaatgatttcgccaaagaatatatgaagaagtttaaatttcaaggggattatgaaataggggctattttcaaaaaggaattaaggaactttctatcagaaaagaaagagaagattgtaccaattccagtaagcgagatgcggaaagtagaacgtggatttaatcaaacaaccgcgatattaaaacaatctggcatcctatatgaagagcttttagccaaaaagcatacagaaaagcaatctaaaaaaacaaagagggaacgattagcatctgaacaaacattttacttt

SEQ ID NO: 3688 - DNA, 2753 bp, Listeria monocytogenes 4b
  misc_feature (1)..(end): n can be any nucleotide: a,g,c or t/u
taatgccatttaccccatctttggcggtaaatattgtggcaggtctctctaaaataaaagtatatcaatttatattagcgcttgtaggtggcaaactaatcaaagtcttcgccattagctatattggctatgactttgtcgacttgattcaccagccgctcaaactggctatattagctgtttctgtcgttattttatggtttgttggaaaacggctggaacattggatgtcaggaaaaaatctcaaataaaaaaatggaaagcacgcgggatgcgtactttccatttttttaataaagtaaatctaaaaattcatctttcgtaatgttaccaaagtattcttttacgtctatatctgctaaagcctcgtccaatgcttcgcgcttataagttgtattgactaatttctcctcaatatccgccacattttttacgccgaagaagtcaccgaaaaccttgatatctgtaataatccctttttgtacatttaagcgaacatcgactgctcctactggaaaacgttttgttcgtgttaaatcgaattttggagattttccgtagttccagtcccaattaccataacgtttagcagagatttcgtggattttttcccaatctgcagcagttaatttatattcttttacgtcttctactttttcaacattgaaaatataaagtaatagcaaatcgcgaaactcttccgttgtcatttcttgatccatgaaatcagaaatattcgctacacgactacgaacagacttaattccttttgattcgattttatctttacgtggttttagcgatgcagcaacattatctaggttcaaatcatacattaatgtcccgtgtgagaacattttccctttcgttgcaaattgcgcatttccagaaactttaaaaccatcaatcaataagtcgttacgcccttttagttccgcattgacgcctaaacgtttcagcgcttccacgattggttgcgtgaatttcgcaaaattatggaaagactcgccatcatcttccgtgataaaactgaaatttaagtttccttcatcatgataaacagcgccgccgccagaaagtctgcgcacaacgatgacatcatttttctccacatactctgtatcaatttcttctactgtattttggttgcgtccaatgataatcgatggcttattaatataaaataacagcacaggctcatctagatttaattcagttaaaataaattcctccaccgctaaattaatacgaggatctttctcattattattatctataaagtacatactcctaccccttttcttctatattaaaatgttttcgtgaatccttttgaagcgagtgcaatttctcctttgtaaatagccgctgcttcttgttttagaacttctaaatcgccaacttcgggtaaatgactgaggagtaatgatttcacattggcttctttggcaatttttgcaacttccgtgctagccatatgcacttttgtttttccggctaggtcatggaaaaaattggtgtctgttactaataaatctgccccctctgaaaaagggataaaactatcttgataagcgctatctgcggtgtatacgaaaactttgtcacctgcttctattctcatagcatagcaaggtaccggatggatcgtctttaagaaagttactttaaacggtccgatttcaagtctatcatctggtttatattcgattgcttttgttacatttgccatttctaaataagaataaccgcgttcatcttctttatgtccatatatcggcaatactggcggtttttcctttttttgtgataataggcgaatgtgctgcaaaatccctacatctgctacatggtctggatggtaatgagaaattattgccgcatcaatatcatcaggatcaatatagttttgcataatagaaacagcacttgcgccaacatcaattaatagcttaaatccagcttcttccagcaaataactagatgtgccttcatttgctaatggatagccaccccaatgtccaaaaacggttagtttcatcactgcacttcctttctcaaaataaacctcctttatatgatacaacatttataataaaaggagaaattatccagaaaaaaagacagcttagaaaatacgctgtcttttctcattatttactagggaaatatttattctctagttcttttgttagcttttccgttttttctagttcaccaaccgcgacaaaccgttttgttgtttcagttggtttatcacatgtaataagtgtaattctagcgtctttcgtatcgtcaatcacacttacttctgtttcatcaatcgtttttgtttccgtaacagtgtattcgtataaattctcaagatctgttagataaatcttgtcgccttttttgactttcattataggaccaaacaacatagattcatcacgcatatggtgacctgccagcggatagttacctttacccatgacttgatcagaacgcatggttgttgcacccgccagtaaattagctgtatttgttcctttgaaaactaagaggttaacgtctacagatggaactgcgatagaaccaacgactgcatctttgtcgtaatttgctgctcctttaataacagatgtcatagagggtagctgaacactttcaaaatcaaatgtagcgtctttttcattatttttctttatatctgatgctttatattgctcgattgtttcatgaccactcatgtatttcacaatgccgttttt

SEQ ID NO: 3689 - DNA, 4978 bp, Listeria monocytogenes 4b
  misc_feature (1)..(end): n can be any nucleotide: a,g,c or t/u
tagaagtcaccgaattaaccaaacaacatgcaaaagaaatgattgaacaagcggaaaaagtaaaacaaacgtattaaaaaaacgaaattgcttgcatatcgaatagtttttgcttaaaatgaataaggtagaaaattattacctggtcataaaaacaactactaattcgaaatgcggcttttttgtgcgataaaggagttatttttatgacaaaaagtagatttttttcagatgtaatagaaacaagttcatttgttttcgccgtagcaggagcagatgatgaagttgtgctcgaaacgattcgtcttgcattaaaccaaaatttaggtaaatttcttttatttggcaagaaggaagacaaaacgttaaccgcgaatgaaaacgttacatggattcaaacagataccgctgaagccgcagcacaaggcgccattttagcggtaaaaaataaagaagcagatattttagtaaaaggattcattccaaccgccacattgatgcatcacgtattaaaaaaagaaaatggccttcgtacagatcaattattgagtcaaattgccattttcgatattccaacgtatcacaaaccattattgataactgattgtgcgatgaacgtagcgccaaaaacaaaagataaaattgctatcacagaaaatgccatagccgtagcgcatcaaatcggcatcgctaatcctaaaattgcgttacttagtgcggtggaagaagtgacagcaaaaatgccatccacagtagaagcacaggaagtagtgcagcattttgataacacaatagccgtctcgggtccgctagctctcgatgtagctatttccaaagaagcggctctccataaaggaattacggatagttcagcgggagaagcagacatattaattgctcctaatattgaaacaggaaatgcactttataaatcattagtctactttgctggagctaaagtaggtagtgcagtggtcggggcaaaagtacctattgtcatttcctcaagaaatgattcaccggaaaacaaattagcttcattcatactaactgtaagactagttgagaaatgatgaaataatgtgaatagacggactttaacaatctgaatgcaaaggcttttatttgattacagcctacgtgttacaatagtccatgggaaaatgataacctaccgcatttttcacaattaaatttggaggaaagcaaatgtcttttgatgttttaaccataaatcctggttccacgtctaccaaactcgctgtttaccaaggcgataaagtactttttgaagaaactgtcagacatacaatgcaagaactagccgactttaataacgtacaggaacaatttgattttaggtggcaagttctacgtcgagtgatggatgcacatggttatgatgtaaagaaattacaagcggtagttggaagagggggcttacttcgaccagttgccggcggtacatatatggttacagaaaaaatgatagatgatttaaaagaaaataaatacggagagcatgcctcaaatttaggggcactgcttgcaaaaaaattagcagatgaactgacaatacctagttttattgtggatccggttgtcgtggatgaaatgcaggaaattgcaaggatatctggcaatgccttcattgctagaaaaagtatttttcatgcattaaatcataaagcagcaggtcggaaaatagccaaagagctaggaaaagattatgaaaaaatgaattttgttatcgcgcatcttggcggtggaatttcagttgccgctcatcgacaaggaaaagcggtggatgtgaataatgccttagatggggacggaccttttagtccggaacgttctggttctttaccgatgaatgattttctagaagcatgttttagcggtaaatggacaaaacgcgaattgcatgaactgattgttggtcgtggtgggatgatttcatatttaggaactaacagcatgctcgaggtggaagctaaagtacaagcaggtgacgtgaaagctatcgaagcttttgatgcaatggcttatcaagttagcaaagaaattggcgcatgttccgttgtattgcaaggtaaagttgacgccataattttaactggtggccttgctagaattgaactttttacaaacaatattattgtgccaacaaactggataaccagtgtgattatagaacccggagacgacgaattaaaatcattaaatagcggtgtgcaacgtgtgctctctggtcttgagaaagaaaaagagtactaaaaggaggagataatgtggcaacagaatatgatgtcgttattcttggcggaggaactggcggttacgtcgcagcaattcaagcagctaagaatggccagaaagtagccgtcgttgaaaaagggaaagttggtggaacgtgtcttcatcgtggatgtattccaacgaaagcgttattacgttcagcggaagttctgcaaacagtaaaaaaagcaagtgaatttggtatttctgtagaaggaactgccggaatcaattttttacaagcacaagaaagaaaacaagcaatcgtagatcaattagaaaaaggtattcaccaattatttaaacaagggaaaattgacttgtttgttggaacgggaactattttaggaccatctattttttcaccaacagctggaacagtttcagtcgaatttgaagatggctctgaaaatgaaatgctcattcctaaaaatttaattatcgcgacaggctccaaaccgcgcacattaaatggtttaagcattgatgaagaaaatgttttatcatctgacggtgcgctaaacctagaaactttaccaaaatcaattattatcgttggcggtggagttatcgggatggaatgggcttcgatgatgcatgattttggcgtagaagttaccgtgctagaatatgcagatcgaattttgccaacagaagataaagaagtagctaaagaattagcaagactttataaaaagaaaaaattaatcatgcatacatctgctgaagttcaagcagctagttataaaaaaacggatactggtgtggaaattaaagcaattattaaaggcgaagagcaaactttcgcagcagacaaaattctcgtttctgtcggtcgttcagctaatacagaaaatatcggtttgcaaaacacggatatcgcgaccgaaaacggctttatccaagtaaatgatttttatcaaacaaaagaaagccatatctacgcgattggtgattgcattccaacaatccaacttgcgcacgttgcgatggaagaaggaacgattgcagccaaccatattgccggaaaagtggctgaaaaacttgactacgacttagttcctcgctgtatttatacttctacagaaatcgcaagtgtcggtatcacagaagaacaagcaaaagaacgtggttatgaagtgaaaaaaggcaaatttttcttccgtggtatcgggaaagcactcgtttacggagagtcagatggcttcattaaaattattgcagataaaaaaacagacgatatcctaggcgttagcatgattggaccgcacgtaacggacatgattagcgaagccgctttagcacaagttttaaatgcaacgccgtgggaagtgggtaacaccattcacccgcacccaactttatcagaaagttttagagaagctgcccttgctgtggatggcaatgcaattcacggttaatacagctttaaaggaggaacaaaaatgactttaaaagaagcaggtttaacagaagataaattaattaaaatgtctaaaacgatgctaatggcaagaagactggatgaacgtatgtggttgctgaaccgttctgggaaaattccttttaccatttctggacaaggacaagaaacggcacaaattggcgctgcgtttgcctttgatttagataaagattatgcattaccatattaccgtgatttagcagtggtgttagcattcgggatgacagcgaaagatattatgttatccgcgttcgctaaagcggaagatccaaattctggcggacgtcaaatgccagctcattttggccaaaaatcaaaccgaatcgttacacaaagttcacccgtaacaacccagttcccgcacgcagcaggaattggtcttgcagcaaaaatggctggtgacgaaattgcgatttatgcatcaactggggaaggatcttctaaccaaggcgatttccacgaaggaatcaactttgcatctgtacataagttgccagttgttttcgtgattcataataaccaatatgctatttccgttccagcatcgaaacaatatgccgcagaaaaactatctgaccgagcaattggttacggcatccctggtgaacgtgtggatggaacgaatatgggagaagtatatgcggcatttaaacgtgcagcagatcgtgcaagaaacggcgagggacctactttaattgagacagtctcttatcgcttcacaccacactcctccgatgatgacgatagtagttatcgttccagagaagaagtagatgaagcaaaaggaaaagatccactgaaaattttccaagcagaattactcgaagaaggttacttaacagaagaaaaaatcgctgaaatcgaaaaaagtattgcgaaagaagttaacgaagcaactgattacgcggaaagtgcagcatacgctgaaccagaatcatctttactatatgtatatgatgaagaagcgaatagctgattaggagggaatttgaatgccagtcatttcatatattgatgcaataaccatggcgcttaaagaagaaatggagcgcgatgataaagtatttattttaggagaagatgttgggaaaaaaggtggcgtatttaaagcgactgctggcctatatgacgaatttggtgaagaccgagtactcgatacaccacttgctgaatcggctattgccggagtaggaattggagcggcgatgtatggct

SEQ ID NO: 3690 - DNA, 2517 bp, Listeria monocytogenes 4b
  misc_feature (1)..(end): n can be any nucleotide: a,g,c or t/u
aagcatagacatagatactgcattccgactttttgaaatggaagaacttaattagggggatatcatatgggttcatatggcgaattgattcgggaaatacggctatctaaaggtttgactcaaaaagaggtatacacaggaattatatctaggtcttatgcaatcggatttgaaaaaggaaaacacgagattactttgagtttgtttgaagaaattttaaagcggatcatggttcctttagatgaattcttttttatttacagagacttttcttcgacagaggatgatagtttttggattgatttcgtcgagctatcaggtaaaaatgatgttgtagggatgcaggcgttgctagataaaataactttagagcgaacggagcagacagaagttagaaaagcgatacttcatacgagaattcaaacgattaatcattatttgcgtacgaatgtgtttgatgaatcgaatatttctgatgaatataaaaaaattattcatgactatctttggaaaatgcagacgtggactttagaagaggttcgtattttttccaacggcatatcattttttgaggaagaagtacaaattcacttttatcaaattatgttgaaatcgtatgaaaagtataggtactatgatagaggaagactgctattttgccatctatttgctaatctgacagatgaactcatcatacagaataaaatcaattatgcgaatctagtactcgaaaaattaaaagaagcatctgaaacaagtggtagttttaacagtgctttttatcgaatagtagccaattattatcaaggggctatttggatgaaagaaggcgaagtggaaaagggctatcgccaagccaaaagagccattcaaacatggaaagaactgcattatgaagcaatagcagatttgtatagcgtggtattaaaacaatttttagaaaaagaaaatatccaagtagaagattaactatccgaagaatttctatttaaaaaacactaaaatggagtcgttttagtgtttttttgtttgtggtaaagatgttttatgtactatatatagcactatttacagagagaaaagaaaggaatgtaaaataaaggcaagaattgagctaagaggaggtcttcggatgataagttatggtgagctgattcggcaaataagacagtctaaaaaaatctcccaaaaagaagtgtacacaggggttattagtaaatcttatgcaattgaatttgaaaaggggacacatgcaatatcaagcctattactcgagaaaattgtcgctaagttaatggtgagtatggaggaatttttcttaatgtatcatcaagaggagttgccggagaaggaagatttttgggaaacttacgcgcggacatgtaaaacggatgaagcaagcgcttgggaatccctttaccaaaaaatatcattagaaaaaggaaaagttaatcaagtgaaaagcgcggcgataaaactggagttagatcatataaaaggcaaacaagtggcggacaaaaaagcggttcaaattttggaaaattatttgattgaagcggttttttggacattgcaggatatctttttatttacgcggatgatgcactatttgccactgaaaagccgagtaccgttctattataaattgttaaacacgctggatagataccgccattttgaacgaggaagaagcattttacaatcggcgctggctagtatcatggatgattttatagagagaaatgaaatagagcatatggagctaatgataaaaagcttagaaaaaattagtgaggactgtgatggtacttatttcaaaattctttgtatgtattatcgtggaattgtgcggtggggagaaggtgaagagcgcgagggtggcgaagaaatcgagcaggcagtagctattttgcgagcattaggttatgaaaataaagcgatagagtatgaaaccatgtaccggcaatttgcgagggaaaacaacgatataaaaacgatggaatgaaagctaaaaaggactattctttttggttttctttttttgagtagtatatatgcgacattagaaaattttaagactccgcatagtattatatagactgaagtacggcttaaagccatattgacagtgaagggaggggctttggcaaaggaataaattgccaactgacactgcaaatttagcgttaaaaggaggaagattgttattttaaagaaaatatttattgcattaattgcgcttgtagttattatcaatacagttagttttacggctgtctctgcaagcacacctacatggttagaacaaaccatgaatagtaatgaaccgtttataaaagagattgaaaaagaaactggtaagacgagagcgaatattacacagacagatttagaagctataactgccttgcgagtaacaggggcaagtgatattccgactaatatcgatatgttaactcatttaactacgttagaagttaagaatggaacattatcttccgtatctaactcagtggg

SEQ ID NO: 3691 - DNA, 4541 bp, Listeria monocytogenes 4b
  misc_feature (1)..(end): n can be any nucleotide: a,g,c or t/u
aaacgaagattgccgaggaagaacaagtcgacgcacttattttagcaggagatttatatgaccgcgccgtgccgcctgcggatgcggtgaaagtgctaaatgatattttagtgaaatggaatgtagaactaggtattccgatatttgccattagcggggatcatgacaattgtggagcggcttgtttttggaaacacagtggtatgaaagtagcaagttgtatatgaaaggaaaatgtacctcgcagtttgaagcgatttcttttatggatgccgaagtgtggcttgtaccatatcacgaaccagcaattattcgggaagcttttgcagataattcgattcgcagttttgaggacgctatgcaagccgtgacgaaacaaattcggtccaaatgggatacaagcaaggcgcagattttggttggacatgcgttcgtttctggcggtattccgagtgattccgaacgacaactagcaattggaaatgtggaccgtgtttctacggattgttttgatggttttacatatactgcactcgggcacttgcaccatccgcatgcgattcggcacccgtctatcttttatagtggatctcctttaaagtattcattttcagaagcaaatgatcacaaaagcgtgcggattgtggaactggaaggaaaagaactggttagcgtgacggagcgctttctaacaccaaaacatgatatgcgcattatttctggaacactagcggaactgacagaaaacttagtagaaaatcctgatgacttttttcaagtgaatttaatggatgaaggtgctttaattgatccgatggggaaattacgccaattttatccgaatattttacatttagaacgtaaaaaacaaacattaaaagaaacgcaagataactttgaagaaatcatgaaaaaagatgatttagagctatttggtcaattttttgaacatgttaatgggacagaattaacggaaacacaaaaacaaaagttagcggatgtttttgaacaagcgaggaaggaggatgcggaatgagaccgattaaattaacgatgcaagcttttggagcctatgccaaaaaagaagtcattgattttgaaaagcttggaacggagcaaatttttgtgatttctggtaaaacaggagctgggaaatcgacaatttttgatgcgattagttttgcaatttttgggaaagcgaacacatttgatagggaaagtttttcgatgcgaagtcattttgcgacggataaagaaataacggaagtaacgctagcttttagattgaaggacaagatttaccaaattagccgcattcctcagcaggaaattgccaaacaacgcggaaacggaacaaccacttcgccgcaaaaagcagaattatatgagttgattggtgacgaaatgaagttgcttgcaagttccgtgcgcgatgttaatgcaaaaatggaagaattaattcaacttaatgtggatcagtttagacaaattttgatgattcctcaaggcgaatttagagaactgctcgtatcggatagtaaagaaaaagaagtcatattgcaacggttagcgcatactgcttactatgaaaaagtggaaaatttgttatgggaaaagcagaagcaagccgaaatcttggttgtagaagcgcgtaaaaaagtagcggaacttgctgaacttagtttaccggatggggaagtttctggaaagacaacgagtgaaatcagcgtgttgcaaaacgaggccattcaaaaagaacaagcaattttaacggaattagaaaataaattaagtattattcggaaacaaacaagtgaagctgttgaaaaagtgacgcttgcgaaagaacaactgcttgattggcaaaatttggataagtatacagaagaagttgcgacactagaagcggagaaagatttttatcaaacaatagaagttcgcatggaggctgcgaaaagagcaagcaaccttcaatcccaagatgcactttgtattcgtttaaaagaacaattagaaacagccgaacaaacagaaaaacaagtagcacttgaggcagaacaggtaaaagcccaattttcacatgcgaaaaaacaaaaagaagctcttgctgaaaaagaagcagaattagaaataaacaaacgaacacttttccaattagaagaaatggaaccgaaaatattggaattagaaacagtcttgatccaaaaaagacgcgccgaattagactggaaaaaaacaacgacccttttagaaaaaataatcgacaaggaacaaaaaatagccacagaactgcaatcagttgaggcgcgattagcggaaataaacaaagccgagctcatgtatttagaagttattaacaaacggacaacattagaagccaggatagagaaagaacaagaattggttaataaacggataaaaatggaggagtgggccgcagccaaacaaactgaagaacaaacattagcacaacttttaatagaaaaagcggaaatggaaagaacgattaaacaagaagaaacaaaactagaaaaagaacaaacggcaacaatcgcagcgcatttgcatgaaggagatgcttgtcctgtctgtggttcacagtcacacccaatactcgcgaaatttggagaaacagctgaccttgaaacactcgaaatagcaaaagcaaagctacaagaaaaacaattagtgattactacgacggaaaaagctatcagtcaactcgaatggcaacttaatgaatgggcagatatgaaagagcaaagtttagccgaaatacaacaaacattagctgaaaatatccaactagctactaatctgagagagcaaataacccagttgcaatccgaagtagctcaaaaagaaactgtccaagcgacattagaatcattgaaaaacagacaaaatgaaacgctaaccgaaaaaaataagatggctctcgaagtagaaaagttgcatcaacaagtgcaactaacggaagggaaacgaacttatttggaacaatccattcccgacgagttgcgagataaggctgttttcgataacaaaatgaaagaactaagctcaaaaatcgaaacacatatcaaacaagccgaacagattgatgcgttgtttagacaggcagaaaaagaaacaaccagactagaatccacgttacattcagcgcaaaaaacaacggtggatgcgaaagaagccttacaagtacagcgcgaaattttcaaagaagccatgaaacaaaatgattttttatcctatgatgagtataaacaagctttgttatcagtagaagaactaaaaaacttagaagaaaaattggccgaatacgagcgaaaacgccatttagctgtatcacgccaagctgatttaaaagaaaaactccaaaacaaacaaaaaccaaatatggaacaactagaattcattatgaaagagaaacaactcgaacttagccaatcagaagaaaatacaatgaaacaacgcgaattcgttgcaaaaagaaaagaacttgtcgaaaactaccaaaacagtattcaggcagtggaacaagccgaagaaaattatgcggatattggcttactagctgatgcagcgcgtggtaaaaatgcccggagattaacgtttgaacgatatattttagcgatgtttttagacacgattattcaccgcgccaaccaccgtttatccaaaatgacaagcggtcgttttgaactacagcggaaaatggaaaaagcaaaaggaaatgtccaaagtggcttagaacttgaagtttttgatgagtatacaggattaactcgacatgtaaaaacactttcgggaggagaaagcttcaaaacctctttagcgcttgcattatcactcgcagaagtcgttcaagaaatggcaggtgggatttcacttgaaacgatgtttattgatgaaggattcggtacgcttgatcctgaatcacttgaagccgctgtagaatgcttactggaaacacaagaaaatggccgcttagttgggattatttcccatgtaccagaactaaaagaacgaatttccgcaaggctagaagtaaccgcaacaaatcacggaagtaccactaaatttattacagctagtagctaaaagaccgcatgcgttgccgtccctcgtcttttcctatataatagtagtttagagtaatggacggttttgggaggaagaaagtaatggagcactttacagcaattcaaaataaaatgatcccatatagtgtgaagcaggctggaaagaaactgatggaagacggagaaatcattcagtttcgtgaaaaagatgcatcagaccattttttaacgtattttattgatcaaaatgtcccacaagatgcgcgtgctgaacatcatgcctgtccccgcgccccccttcctttgcgcgccttcgcgccgcccgtgtgcctctcctcctccccgcctctctccccacccgcccgcgcccgcgcccccggatcgcccccctctcgctcccgcccgccccagtccgctccctctcccctccttctacgcctaacaaaaaaaaaaaaa

SEQ ID NO: 3692 - DNA, 4152 bp, Listeria monocytogenes 4b
  misc_feature (1)..(end): n can be any nucleotide: a,g,c or t/u
tctatgcgattggctcaggtggtgtttctggacaagggcttggcgaaagcgttcaaaaacttggttacttgccggaagcacacaccgattttattattgccgttgttgcagaagaattaggtgtgttcggtgtgatgtttattattttggcactgttcttcattatctttaaaactatcacgaccggactcagggcgaaggatccatttgcctccttaatgtgctacgggattgctagtctgattgcgattcaagcatttattaatcttggtggagctagtggtttgattccgcttactggtgtaacgctgccatttattagttatggtggatcttccttaatggtgctctcgatgatgcttggtatcgtagcgaatatttcaatgttcactaaataccaacgtgtttataaagcagatggttccacgagagagttaccaaagaaacaaaaaagacgttaaattatgaagaaaaagctaattaattagctttttctttttttgctttaccgcatgtttttggcgttttatagccagtttattcgtgttttcgatattgttttaaatatttagaaagaaaataatttacatctgatggtatttaatactataattgaagttatataccgttttacagcctaaaaaaaggggattatcatataagtgtacataatcatttcaaccgttggaggctatgtataaagtatagaacagatcagtgttggttaggaggaaaaaaatgaatcgaattaaaaaagtattagtagcaaaccgcggagaaattgctatccgtgttatgcgtgcgtgtactgaactcaaaatcaaaacagtggctatttattcacaagaagataccggattttttcaccggtataaatcagatgaagcttatctggttggagcagggaaaaagcctattgatgcgtatctagatatcgaaaacataatagagattgctaaagaatctggtgcagacgcgattcatccgggatatggtttcttgtccgaaaacattgaatttgctcgtcgttgtgagcaagaaggcattattttcgttggtcctaaatcaaaacacctagatatgtttggtgataaaatcaaagcaaaagaacaagctctattggctgatattccagtaattccgggaagtaatggacccgtggctggtattaaagaagtagaagaatttggtgagaaaaacggttacccattaatgattaaagcttctcttggaggcggcggtcgtggtatgcgtgtcgtagaatcaaaagaacatgtcaaagaaagctttgaacgtgcatcctcagaagcaaaagcggcatttgggaacgatgaagtatacgtagaaaaatgcgtgatgaatccgaaacatatcgaagtacaaattcttggtgacacccatggcaacatcgttcatttatttgaacgtgattgttctatccaacgtcgtcatcaaaaagtagtagaggtagcgccatgtaatgcgattacttctgaactacgtaaccgtatctgtgatgctgcagtaaaattaatgaaaaatgttgattacattaatgctggaacagttgaatttttagtggaaggcgatgatttctactttatcgaagtaaatcctcgtgtccaagtggagcatacaattactgaaatgattacagggattgatattgttcaatcacaactattcattgcagatggttacgcgcttcacgaccaactagtagctattcctaagcaagaggatatccatattcacggttctgctattcaaagccgtattacaacggaagatccacttaataactttatgccagatactggtcgagtagatacgtatcgctctacaggtgggtttggagttcggttggatgctggtaacggcttccaaggaacagtagtaacaccattttatgattccttacttgtaaaattatgtacttggggaatgacattcgaacaagcaacgcgcaaaatgcgtcgtaacttaattgaattccgtatccgtggtgtcaaaacgaacattcctttcttattaaatgttgttcgtcatccggattttgcaagtggtaattataatacaagctttattgatacaacaccggaactatttaaattcccacatattcgcgaccgtggtacaaaaacgttgcgttatattggtaatgtaacggttaatggtttcccaggaattaagcaccgtgataaacctgtatatgcagaaccacgcttgccaaaaattccgtacggttcgcaaatctctccaggaacaaaacaaattttggatgcaaaaggtccagaaggcgttgtagactgggtgaaaaaacaagaagaagtgctcttaacagacactacacttcgggatgcgcaccaatctttacttgcaacacgtgttcgctcgaaagacattttccaaatagcagatgcgatggctcatttattaccaaacatgttttcatttgaaatgtggggtggcgcgacttttgacgtggcatatcgtttcctaaatgaagatccttgggtgcgcctagagacacttagaaaacaaattccaaacgtgatgttccaaatgttacttcgcggagctaatgcagttgggtataaaaactatcctgacaatgttatccgtgaattcgttaagcaatcagcacaatccggtgtggatgtattccgcgtgtttgacagcttaaactggatcaaaggcatggaagtgtccattgatgctgttcgtgaagcagggaagatcgtagaggctgctatctgctatacaggagatatcgatgatgacacaagaacgaaatataccatagattactataaagatatggcgaaagagctcgttgctcaaggcacgcatatcctaggaatcaaagatatggctgggcttttaaaaccacaagcggcataccgtttgattggtgaattaaaagatacagtagatgttccaatccaccttcacacgcatgacacaagcggtaacggtatttatacttacgcagcagctgtcagtgctggcgttgacattgtggacgtggcatcaagcgcaatgagtggggctacaagccaaccaagtatgactggtctttattacggattagtgaatggtaatcgtcaaacgaatttagacgctcaaaattcccaaatcattaatcattactgggaagatgttcgtcactattacaaagactttgacaatgcacttaattcacctcaaacagaagtatacattcatgaaatgccaggtggtcaatatactaaccttcaacaacaagccattgcagttggacttggcgaccgttgggacgaagtgaaagaaatgtatacagtggttaatcaaatgtttggtgatatcgttaaagtaacaccttcttccaaagttgttggagacttagcactatttatggttcaaaatgaattatccgaagaagatgtatacgaaaaaggcgataccattgatttcccagattccgttatcgaattctttatgggggaaattggtcaaccatacggcggcttcccagaaaaacttcaaaaactagtactcaaaggacgtacaccacttacagatcgtccaggcgctttaatggaaccagttaactttgttgaagtcaaagcagaattaaaagaaaaaatgggttatgaaccaactgaaaaagatgtcatttcctatattttgtatccaaaagtgttcctagattatcaagaaatgattaataaatatggtgatgtaacagtccttgatacaccaacattctataaaggaatgcgtttaggggaaacaatcgaagtagaacttgaaaaagggaaaatccttttaatcaagctaaattctattggtgaaccaattgcggatggcacacgtgttatctattttgaattaaatggacaaccacgtgagattaacatccaagatatgaacgttcaatccactgttattgcacgccgtaagattgatacaactaaccctgaacatgttggagctacaatgacaggttcagtcattcaagtagttgttaaaaaaggcgactctgttaaaaaaggtgatccactactaatcacagaagcaatgaaaatggaaacaacgattcaagcgcctttcgatggagaagttagcagcatttatgtttctgacggcgatactatcgaatctggtgat

SEQ ID NO: 3693 - DNA, 3277 bp, Listeria monocytogenes 4b
  misc_feature (1)..(end): n can be any nucleotide: a,g,c or t/u
ggggctggaaagctttaagcggagcggtttcgacaacgaacaacgtaaatagtgcggatgttttcaaagtaacgaaagcaagcaccgattcagaaggtaatatttccggagtgacatttaaaaatatttggactgataagtatatagcttatcgaaatggtattttgattagtaatagcgagactcctgattcattcaaattaatccgtcaagctgatggaagttatgtaccagaattgagcggtcgctatgttagtttctctgttggactagtaacagatgaagcagctggatcaaaaatcgatttatattcaactcaggaaaaattagaacaagtttcggaagctatttctgtaaaagcacttgaagagccagctatttcagctgagaatattagtgtttatgataaacgcgtcaaaatagatgttattggtgaggataaagacaatacaacggttaagaaagataacaagaatgaactgtttgtaaatgtttataaagcagatggaacaacgctcgttaaatcaattcggattgatggactaccaacacgcgatgtttctgttacagagctttcaccagattcagattatgttgttaaagttgaagggaaatatgatttgttagatggtaaaggcgaaaaagacaaagtgtatttttcagagacaattaagacagaaaaaagtttaccgagtatgacttcaactgattattcatggaatccagcatatggtcagcgagcaattaaaggaaatatccattttactgatgaaagtagcgtattaacaaatattgaatatcgtctgtacgatgctgcgacaatttcttccaatttatctaatttagtagctttagagcaagagttaggcaataaaactcccgtagctacatttgataatatgacaaatagtccagaattctctatatataacagttctggagctcaaaattttgtttctggaaaaacatatgtgattgcagcatatatgaagacaagtctaacaagagcacctatcttcctaagtgatgccaaggagctttatatttcaccgccaagtggtgtttctgctccaatcacgctagagaatgtttcaacaagagaagcgactctgaaattctcttataatgatccacaaagttattttgttggcggaacaaataaagaattccagtacgtattaaaaaacacgacaaatggaaaggaaattaaaaaaggatcgtttcaaggtgggaatacagctagttggataaatacttttgaggaattagaacctgcaacaggatatacgctaacaattagcacccaatacgataatctaaatggtggattagtaagagcatggaatactagctttaatttcactacagatgatgaatatgtaacttcgaactcacttaccattcagctagatgctggagcaaaagtagttaaattacaggctaaagaagtcaaaccaggatctacaacgattgaaaatattaaaatggagttctatgagctaatcgactatggaggcaataatgaacataatcaattagttgaaactaaaaatatcactttaccaagttcttatccagcaactattgcagcagattttaatgtggcaggtaagaagaaaaatcaaagtttcttgggtaaaatgattgtcacctatcgaacaccaacaaatgaagttaaaacgtatgaaaaaacatctaatttcattactttacaagaagatattgccgcaggattaaaagcatttaagagtgtgcgagcaacaaataagactttagaagtaaaattagatactccgcaagttaatttaaccgataaaggagattacacgtatgaattgaagggcgaaaatggtgaggtaattgatacagaaaaagttgcagcggaagatatttctaaaactgtatcgttatcaatggagccaacaagtgattatacgttgactgtcattaatccagataaccagcccgtcgcactttatcaaggcaataacgaagaaaataatctgaaagctgaaatcaacaaagatagttttacactgatgagcaataacacagccgatgctgaaactacaatgacagtaactgtagagcctaaagaattaacagcatggcaaacagttcaatcctggtttggtaaagactttacagaaacttataacatccaaaaagatgagctagatacaggtgtgaaaattgatgaaaattatcaagacactaaagttactgtcgaagaaacaaaatcaggaaagaattttggaattattgaattggaggagagcaaatgaaacctacatggaaaatagggataatcgttgcagctgttccgttaataattattgctgtcgtcttatgggggtcttttaaggaggcaaggtataatcttgtctctctccctgatgacggtgtagtcctaaataatgagcaagagacattgcaatttcaaaagggcaatacgctttatcgcagttggaatagtgatcaattaattgcgaaaaacgataaagaagatactcgaaacgaaattatggagagtaccatcctttatctaaataaagaagccttaatgtttactaagagtgttcccgtcattgatacanatggggttagtagcaactaaaaggaagacaagtctaccaacagaccaattcttcctataaatacaaaaactcagaaatcacggaaaacagtattgtaaaactagcaaaccgtcaatactatttaaacgcagatgcaacactttatcttggcggcaaagaaatcaaaaaagtgtcgaaaccattacttttgattgataaaacaggaagcgtcactatttatgaaaacaaaaagaaaagccgttttcttggtcatatgaccttgaaagtcaatgataaaacggttttagatgctagtaacgaaacgtatactgtcggcgaacggaaaattgatttagctagctttggtggaacagacaatgaaaagatagtcgtaaaagaagataagaaaaagaccgcagaatctgcgaaagaaaaagagtctgcgaagaaaacagcaagtaactcctctcaatcagaaaatgaaagtaaccaaacaacaaaaggtacaggcaatcaactcaatgctaccaaaaaatacggaaataatttaaatgttggaaatggaacttctgattcggaaccaaacgatggtaaggatacgaaaaataatggttcaggaagtaatcgaatggtggtactttccagcacncgttnnccatcaagcagctgganatnacttagtggnnnnaagaaggttagcc

SEQ ID NO: 3694 - DNA, 2947 bp, Listeria monocytogenes 4b
  misc_feature (1)..(end): n can be any nucleotide: a,g,c or t/u
tgtgctggaaagagcaaagtacaaattaatatagatactaattttttcaaatgactcacattcgcccctcctttgtttactcaagattaattatttcataggaggaagcagctaaatgttctcaaggtacaaaaaataggacagtttgttacgaaaatgtgaactattttacgtttatagccgcaaaaatgccattattaacaaaaaacaaccaaaattgttgaagaattcaacgattttggttgttttatttatcttattcgaatcgattcgctttcaactaatctagcaccctttacttcctcaccagattttagtatctctgcaattcgctttttatcaattttaggttcttgtagtaaaaagaacgattttagcaaagcttcttccactatttccacacttggtggattcttttgtatttgaattgtaaaaagtgtactgtttatttttctaatttccattcgttccatctctgtttgtaaatagttttttaaattttgaacattattttctagtgcttgttttcgttttaaaagtcgtttcgcttctattcccgccatttcagcatcagcagctaaagacttaataagtttaacaatattctctgatttatcatgaaaactatcagtaagcgcatctaacgtatctttcacagcatcagtattattttcttccaaaaattcttgtacttttaaataattatcggttagttcatatagtttcatcgttcgcaccctttccaaaaaaggaaaaagcgccaaaagttattatattttggtgctttctcattttgttactaattttccttgaataaccatccgtcctttttcataatctttttctgtatcgcaagttgaaagtgttataattcggtcctttccactaacttttacatttaatttatacatagattgttgtttcactttttgtaaataatcctcaaaatcagttgtttccggaaattctgtttcaatgtaataaaaatcagtcgtcgtttcatacacagcaaagatttccacttcataattcgccaagctcgattcataggaaaacgttggatgagccgccaaaaaatctttgtccaagtatttacgtaaatccgcaaacatggatccgtctttcatattatgcccataaatgatcgtatttttatccaaaaactcattcgtattccgataatctttaaaaatactgcccgctcgtgctttttcatttttataattgtgatgtaaatagtaatcattatccgtactttgcaaaattggataatctatttccgtatctgcaatcgtcagccacccaaccatatctttatttaatttttgcaaatctctaagctcatcacgtacttcaccattcacatttgtagtagcaacatcttttgtgtaaacagctttcgcatcatctaggattgtctggttatgcttattttcatacagttccattccaattttccatccagaaaaaagaaaaaccactaacacaaccaaggtcaaacttttccccaaaaacgattttattttcactctttaaaactcctttcgcttttgaggaacaatgtatttcccagtgttcgcatcgtttaaaaccttcgcaactacaccataagtttcagcaatcagctccgttgttagtaattctcctggtactccttttgcaaccactttcccatttttcatcacaatcaaatggtcactatacatcaacgcttggtttaagtcatgcaaaatcattacaatagtcaaatttttttcttgatttaaccgttttactaactctaaaatttctagttgaaaatacatgtccagaaatgtcgtcggctcgtccaacagcaaaataggtgtatcttgaaccaatgctgttgctataaaaacacgctgccgctctcctccagaaagactatcaacaaatttctccgctttttcagttagctccgtttgcatcaaagcctgctcaacagccagatcatccgccttcgtccgagtcattcgccaatttttataaggtagacgaccaaagtaaagcaattccttcaccgttagttcattcggaagaacgttattttgatgaacaatcgctacattttgcgcaaattcttttgctttccattcaaaaatcgatttcccttctagtaaaacatccccagaatcaggcgaaagaagtctagccaaaatttctaataaagtagatttcccactaccatttggcccaacaatcgtattgattttatttttctggatagtaaaggagacattttttaaaatcgcatccgttccattataactaaaattaacgtcccttacttccataaaaatcaccctttcgcattaaaaagattaagaacggaccaccaataataagcataatcacagacgcagggatttccatttgttgaaataacgttctgcctagcgtatccgcgaaaagtagcaataaagccccaaataatattgaaaacggcacaagtatttgataatttccgccaactagttttctggcaatatgtggtacaagtaaaccaacaaacgcaataacaccaactaccgccgtggtaattgacgcaaggagtacagcaatcaatgccagccaaatacgtgtcttattaaccggcacaccaaagcctctagccatcttattctcaagccccaacacattgcaccatttagcaagtaaaagcgcgcaaatcagtccaatcgttacatatatcaataaagtttccacgtcggaccattttttcattgccaaacttgcggcactactggccgactgactagaaacaagcgccacttgcgaagataacgcatcactcagccctgtaaaaaccgcattaatcgcaatccctaataataataaaacgaagcggattaaaatcagaacgataactaaacaaaaagactagaaaacaagccagtgctcccccaataaaagaaaaaagtggcaacca

SEQ ID NO: 3695 - DNA, 2499 bp, Listeria monocytogenes 4b
  misc_feature (1)..(end): n can be any nucleotide: a,g,c or t/u
gtacattaaatgcagttaccaataataaaaaagatatggaagttgtagcagccgaggcgaaaatgagcggcacggttattcttcttttagatgaagtacatcggttggataaagcgaaacaagattttttattaccattacttgaaagtggcgcgattatcttaataggtgcaacgacaagtaatccttatatcgcgattaatccggctattcgaagccgaacgcaaattttcgagttaaaacctctaacggtagaagatattatgataacaatggaccgggcgctttcagataaagaacgcgggcttgggaattatgatgtagaaatagatgaggttgcgaaaaaacattttgcaacggcgagtaacggcgatgtgcgaagtgcgctgaatgccttagagttagctgtcatttcttctgaaccaaatgaggatggtgtgattcatattacgctcgatgtggcagaggagtgtttacaaaagaaaagtttagcccatgacaaagacggcgatgcccattatgatgtattaagtgcttttcaaaaatcggttcgtggtagcgatgtgaatgcggcactccattatatgggacgtttaattgaggcgggagatttagtcagtattagccggagaatgctcgttatggcatatgaggatattggtcttgcgagtccacaggccggggcgcatacactcgcagccattcaaaccgcagaaaaagtcgggtttcctgaagcgagaattccgctcgccaatgctgtcatcgagctttgcctttcgcctaaatccaattctgctattatggcgattgatgcggcactagcagatattcgccaaggaaaaagtggagaagtgccagatcatttgcgagatggacatcattctggtgcagaaaaacttggacgagcgattgattataaatatccacataattatgataacgcttgggtggatcaacaatatttaccagatcgtcttaaaaacaaattgtattatgcgccgaaattcacttctaaatttgagcagacaattgctggtgtgtatcaaaaaattaacgaaaataaagcaaaaaaagaataaaaaaagtgccaaatgaaaagtcgctaacattgaaatttcgtcttttctatggtattctaaatgaagaaaagaaaccctaatgtattcgatatagttcctaatatttttgaaccgaacaattttttatacctagggagcttggagttccggcgcggcgcacatgccttcacacgaggaagtgcaaaccgttagacagagcacccacctgctttaattgatagcgggttcaaaggaagggaatcctaaacggtacgattggggtttcttttttgcgtgtaaataggagttattcctctttactttacaggagtattgctgttacaataagaaacgattaacggcgaacaggaattcgtctacaaaaaaggacgcgataaaaaatggaaaatagaatttacttagaccatgctgcgacaagtccaattcatccagaagttatccaaacaatgcttggcgcaattacaaatacgtacggcaatccttccagtatccattacgctggacgagaggcaagaaaagctttggatgaagctcgtcatacaattgcagatagtatccatgctatagaaaaagaaataatttttacaagtggtggaacagaaggcgataacttggcgattatcggagcagctttagcacagcaagaaagtggtaaacatattattacttctcaaattgagcatcacgctgtcttaaaaacatgtgaataccttgaaacgcaaggatttgaagttacctatttgccagtagatgagcatggaatagtatctatagagagtttacaagaggccttgcgtccagatacaattctagtttctattatgtatggaaataatgagataggcacgattcaaccgattgcggagattggtgcagtgttgcgcaatcatcaagcaatttttcatacagatgcagtacaagcttatgggctattaaatataaatgtaacggagctaggggttgatttattaactacttcttctcataaaataaatggaccacgtggcgtaggttttttatacgtcaaaaatggcacacggcttatctaccaaatgcacggcggagaacaagaacgaaaacgtcgcgctggaacggagaatctagcgggaatctgtggttttagtgctgcttcttctatcatgatgaatgaacgagagctaaaaaatgaggaatatatttccttcaaaaaacgaatggcagaaatttggcgttcggcagatcttgattttgaagtgaatggattagaagccaataccttgccacatgtatttagtgtgcgttttccaggagtttcgattgaacaattattaatgaatttagatatggacggaattgcagtttctagtggttcggcttgtacggcgggaacagtagatccatcgcatgtattagtagctctttttggtgaaaatcacccagc

SEQ ID NO: 3696 - DNA, 4314 bp, Listeria monocytogenes 4b
  misc_feature (1)..(end): n can be any nucleotide: a,g,c or t/u
gattttaacatttcttctttattttaattgatatagtgttcctgtaccagtgccattcattccttgagcgccaccttgcatattaaaagaagcgctagaagtggtgtcatcatccgtagaaccggagctactccacttcgaactatcaatttctgtaccgttttcttgaatccattttaccacatctgagtcagaagctttactatttgatgggagatagaaatattttatttcaccggcttgaatcatttgttttaattgttttacagttagagttggatctgttccattgaaaccaccaagtgccataacagcttctttcgttttaataatataaggacctgctgttgttgcatctgttgtcccaaataagtaggtttctccggtattgtttttctgtaaatagctaattaaatcactatcaacagatgcatcggcgaatccaccaccactagattgttttaattgtggtccagcttcgggtaaggaactattcccaccatataaaataggtgttaaagaccaatatgttggagcaatgagcaaaatcgctaaagcgagcgctgttattttcgcggtgagtttggaaggttgtggtctaagtacaattaagataatagacgtaattagtgcagcaataccaataactaccgctaaaacaggcaagtaagcagcaacaaagaatgcttgtagacctccagttagcgtaactgcagcaggtagcaggaacctttgccaattctctttgtcttggtataaccgaaagagcgccactagacctacgccactaagtaaagcaattggcggagctagcataatcaaataataatgatggaaaaagccagcgatactaaagaatccggcgacagggataagccaagctgcccagaaaactatttccttttgtctggaggtcaattgataaattcgtttattttcatttcgatacaccaggaaaatggctagcataccgataatagcaagtggtaagaaccaactaatttgatcaccaagtgcggtttggaatagacgaagtggtccagcgttccctgttccaaacatgcctgtgctaccagtcatttttgatccattcccgccgccgtttgccgcattactgggagctccagttggaggagtgccattatttccttgaggaggagttccgccgttagcaccgtcctgcatacttccacttggaggagtcggtggggttgcgttacttgaatctgttgagttagtgctaggaggagtccccatttccacattaccattactacctgttccagtttcttgaccaagaagccgttccataccattatagccaaatgccaactcaagcaccgaattggtttgactactaccgatataaggtcgctctgaagcagctgtttgatcaactacgactgcccaagaaacagagacacctagcattaagacaagtgcgattactaattgaactagcttttttctccaacttagttttgtagcaataaaatagaagagcaaaaatgcgggcacgaccatgaaagcttggagcatttttacattaaaaccgacaccaatcaacgcaaaagaaagtaaaagccagccgatttttgcacgatgaacagctttaaaaaggaaaaaggttgctagtaataacacaaatacaagaatagcatccatattattagtacgcgtcacggctaccgcaataggagtcagcgccataatcaaagcagtaattcttgcagcccatgcgccaaatctaggtttgacgagcacataaagcaaaatcaccgaaccaacaccagccaacgcttgtggtaagataacactccaaccatgtatgccgaaaataagggcactgatcgcttgcaaccaaagtgcaacaggtggcttatctaccgtaataaaaccagcaggatcaaaagctccgtagaaaaaattatgaatattttgcaccatacttgtcacagcagctgtataataaggatttaccgtatcatcattccaaataccataaaaattaaaaaagatggcaataacaataattccaacaaaataaaaatctaaatgttgtatccgtttcttcatattcttcacttctttccataagataataccttttattttagagttcaaatatgaaaaaaacgtgaataaatttagaaataaacgaggtatttattttttacaaagaaattccagaaaaagccttgtcaaaactaacatagaatggtattatataaaagttgttaaaacactaagaactacttactatgcgggtgtagtttagtggtaaaactacagccttccaagctgttgtcgtgggttcgattcccatcacccgctttatatttttttataaatcctgttatcaacgcagtgtttcgacctttttaagcgaagcattgcgtttattttattgcctgaaaataaggagagaggggatgatgatagtgaagtcgacatcagattacgccgcattgaaagaagaactcattgcttatgcgcatgaaataggtattcaaaaaattggtttcacaacagcagacccttttttatttttaaaagaacgattactagaagcggaagcgctggacctttttacaggatttgaacatccggtaattgatgaacgggtttatccagagcttattttcaaggaaccgcagtcgattatcgccattgcacttgcttatccgtctaaattaaaagaagcacctataagtaaaaaaggagctagacgaggtgtatttgccagagcttcttggggaattgattatcataccgttttacgagaaaaattagcgctactcgaaacttttttaagtgaacgtttgccagatgtacgaatgaaatcaatggtggatactggggaattatcagatgtagctgtagcagaacgagcgggcattggctggcgcgggaaaaacacgctgctcataacgccagaatacggctcgtgggtctatttaggcgaaatgataaccaatataccattcgaaccagatacgccggctagcgacttgtgtggtagttgcaatcaatgtgtgaaagcctgcccgacaggttccttactgggtgaagggaagatgaatccgaaaatatgtttaagttatttgacacaaacaaaagactttctagatgaaaaatatcgcgaagtgttgcataatcgtttgtatggttgtgatacttgtcaggtagtttgtccgtataatcgtgggcatgatttccactttcatgatgagatggagccggatccagagcttgttcgaccagaattaaaaccactattacacatttccaatcgcgcttttaaagaacaatttggcgatatggcgggttcgtggcgtgggaagaagcccattcagcgaaatgccatcattattctagcgcggtataaagataaaacagctgtaccagacttaattgactgtttacaaaacgatccaagaccagtcattcgaggaacggctggctgggcgctaagaaaaatcggtggaagcgatgccgaaaaagctgtcgagcaagcacttcaaaccgaacaagatgaacaagtattacaagaattaacagccataacaaattaatagaaaccaggtgaaaagcaatgccaaaccatatcgtactatatcaaccagaaatcccagcgaataccggaaatatctccagaacatgtgccgggacggatacttacttacatttaatccgtccacttggtttttcgacagatgataaaatgttaaaacgtgctggacttgattactgggataacgtaaaactttcctattacgattctctagatgaattcttcgagaaaaatgaaggcggagaattttactacattaccaaatttggtcgtcatgtttatagtgatatcgattatagtgacccaaacaaagattatttcttcgtttttggaaaagaaacgaccggattgccagatgcgcttttacaaaagaatgaagaaaattgtttgcgtattccaatgacagatcatattcgttcgttgaatttatcgaacacagcggcaattttagcttatgaagcgttacgtcagcagaattttggcgcacttttacaagaaccgaattacgatcgaaaaatttttcaagactaagggggagttaggatgaatcaggcgatagatgctattctaggacattactcagtgcgaaaatttgaagataaggacttaacggaagaagcgttgaccttacttatcaagagtgcacaagccgcatctacatccagttttgttcaagcatactccatcatcggaataacagataaaggcgntcgtgaacaaatctcagccattgcaggaaa

SEQ ID NO: 3697 - DNA, 4767 bp, Listeria monocytogenes 4b
  misc_feature (1)..(end): n can be any nucleotide: a,g,c or t/u
aatcgacatccgcgaaaaattagtttttaaagaaagcgaagaagaaatggccttagtaacattacagcaggaaaaaagtatcctcgaaaatgttattatttcaacgtgcaatcgaacagaaattattgcggttgttgaccaaatacatacaggtagatattacttaaaacgctttatggctaactggtttcaaatggatatggaaaaaatcgaaccttatttgtttttccatgaagaatcagatgctgtcaatcatttatataaagtaaccgcgggacttgattcgttagtactgggagaaacgcaaatcctcggacaagtaaaacatgcattcgaaatcgccaaacaaacggctacaacaggtacacttttaaataaactttttcgggaagtagttactttcgcaaaaaaagtacaccaccatacaaaaattaatgaaaatgctgtgtctgtcagttatgccgctgtagaggttgcaaaaaaattatatggttcattagacaataagaaaattgtgctagttggtgcaggggaaatgagtgaactcgctttgcaaaatctcgctgggagcggcattgcagatataaccatcatcaaccgtactaaatctaatgcagaattattagcaaatcaatttcaagcaaaagtgggcgcatatgaaaatatgaatgaacatttgatgctagcagacatcgttctcgtttcgacaagtgcggcagaacctattattaaacaagctgctatgcaagatttgatggaacaaaaagcgagttcgatgcttgtaattgatatcggtttacctcgaaatgttgaacatgattgttcatacattcccaatttccatttatatgacattgacgatttggcaggggttgttagcgcgaactcattagagcggcagcgaatcgttctggaacttgaaaaaactattgaggcagaagttcgtaactttttcgagtgggaaaagcaactaggcgtcgtccctgttattcgtgctttgcgtgaaaaagcgttagatatgcaagaagttactatgactagtttagaaaataaacttcctggactaacagaacgcgaatacattcaaattggaaaacatatgaaaagcattataaaccaaatgctgaaacaacctatctcagaattaaaagaaatgtctgtagaagaagatgcaactacaagtattgaacattttaaacgtatttttgggttgagtgaaacagatgttactgtaatagaaaaagaacaagccgaaacgaggagttaacggatgaaacggaaaataattgttggttctagaagaagcaagttagctttaactcagtctaattgggtgattaacaagctcaaagaaaattatcctgagttcgattttgagataaaagaaattgttacaaaaggggaccgtattttagatgtaacacttagcaaagtaggcggaaaaggtctatttgtatccgaagtggagcaggctttaagtgatgaagtgattgattntgcggtacatagcatgaaagatgttccatcaagtttgaaagaagggttaattattggcgcgattccaaaacgtgaatcgccattagattgcttcgttttcaatcgagtgaattctctagatgagttaccacaaggctcggtcattggtacaagtagcctccgtagagcggcacaacttctaaaacatcgacctgattttgtgattaaaccgattcgaggcaatatcgatacacgtcttcaaaaattacatgcagaaaattttgatgcaattatcttagcaaaagctgggttagctcgtatgggttggttagaaaatactacgttaaaactagaagacatcccaccagaattatgtttgccagctgttggacaaggtgcacttgctatcgagtgtcgcgaaagtgatcaacaaatccgcgatatgttaacttctattcatcacgaagaaactggaatttgtgtagaagcagaacgtgttttcttgaaaaaattaaatggtggctgtgaaattccgattgccggctttgctacaagagctaatgaagtcgttcattttaaaggtttagttggtaatgcggatggttccatcattcttgcatccgaacaagctggtgcaaatccaagtgaaattggaaataaagtagcagaagatttgctaagtgaaggtgcagatactattatcaaagaactgagaaatatatgagtaaaaaagttgttttaacaagagaagcgaataaaaacaaaccatggcaaacctatttttcgcaaaatggttttgaagtgacgtcaatcccgctgattaaaacacgacctataaaaatggatttgagtcgagaacaacaacaaacagactggctttttttaacaagtgcaaatgctgtagaatatttctttacgaaccaacatgaaagattcaattataaaatagctgtcatcggtgaaaaaacaaaagaaaaactggcagaatttggtcacgaaccaaattttgtcccatctatctatcagtcagaagtatttttagaagaatggctaaacgaaaacccagagaaaacaagtatcttaataccacaaagtaatttaagcagaacaataataaaagatagattgattgaaaaaggttacatcgttgtttcgtttgagctctatgaaacaatctttccagaaaattctaaaatacggttaatcgaacaactgaaactaaatgaaacacaaataattgtttttgccagcccatctgcatggaaaaacttctattccactgcgaagtcattccctgctcaaaaagagaagtggcatattgcatccattggtagtattacaacagaagccattatagcagatggatgggaagtaaaatatcaaccaaaaaccttcaccatgaagcacctagctgatttgataatacaggaggaattaaaatgaaaaatcaatttgatagacatcgtcgtctaagaaaaaccaaaacaatgcgtgatttagtaagagaaacagttttacatacagatgatttaatctatccgatttttgttaaagatggcaaagaaccaaaaacagaagtagcttctatgcctggggtttttcaatatcctttacatgaactagaagaagaaatgcgcgtagttgagagccttggtattaaagcggttattttatttggtattcctgccgagaaagacgcagttggcacgcaagcttatcacgaccacggaattattcaagaagctacaaggcttataaaaaaaagttttcctgaaattcttgtggtggctgacacatgtttatgtgaatttactgatcatggacattgtggtgttattgaaaacggggaaattctcaatgacgaatcgcttgaattattgaaacaaacagctgtcagtcaagccgctgcaggagcggatatcattgctccatctaatatgatggatggttttgttcaagtcattcgcgaagggttagatgaagcgggattttatgatatcccaattatgtcatatgcagttaaatatgcgtctgctttttatggaccgttccgtgatgctgctggtagtgcccctcaatttggtgatagaaaatcttatcaaatggatcctgccaatcgtgaagaagctcttcgcgaagcaatgtcggatgaacaagaaggtgcagatttccttattgttaaaccatcattatcatacttagatatcatgcgcgatgttaagaacaataccaatttaccagtagttgcctacaatgttagtggtgaatatgcaatggtaaaagcagctgcgcaaaatggttggatagatgaagaaaaaattgttttagaaatgctaacaagtatgaaacgagcgggtgcaacacttatcattacttattttgcaaaagatgcatccaaatatttaaataaataggaggtaagaaatttgcaaaactattcgaaatccgaaaaggcctttaaagaagccaaaaaagtcttacctggtggtgtaaatagccctgttcgagcattcaactctgtagatgcctcgccagtttttatggaccacggaaaaggcgcttatattacagatgttgatggtaacgaatatattgattatgtgttatcttggggccctctaattttagggcacgctgatccagctgttgttaatgctattacaaaagcagctctgaaaggtaccagctttgggacgcctactgagattgaaactgaattagcaaaattagtaattgaacgtgtgccatctattgaaattgttcgtatggtttcatcaggaacggaagcaacgatgagtgctattcgtttggctcgcggttatacaaaaagagaaaaaatcttgaaatttgaaggaagttatcacggacatggagattctttattaattaaagctggttcaggggtagcaacactcggattaccggattctccaggagttactaaaggtcttgcggcagatacaataacagtcccatacaatgatattgaaggagccgaactggccttccaaaaatatggagaagaaatagcagcagtcatagttgaaccagtcgcgggcaatatgggtgttgttcctccaattgatggatttttagaaggacttcgagagcttactacaaaatttggctccttgctcatttttgatgaagttatgaccggatttagagtagattactattctgctcaaggctattatgtggtaacgcccgatcttacttgtttaggaaaagtgattggtggtggtttaccagttggtgcttatggtggaaagaaagaaattatggaacaga

SEQ ID NO: 3698 - DNA, 3800 bp, Listeria monocytogenes 4b
  misc_feature (1)..(end): n can be any nucleotide: a,g,c or t/u
aattctaatataaaaacacggaaatcctattaatgaggacttccgtgtttttttgttatttcaaaaaatcttgtaaagcttttgcgttagcagccatatcatctaaacgaagcactgctcccgctccatcaattcgctcattgtgccatttcccttcaacaggaatcgcgaatttttccattgtttctgtttttcctagtaggaaatctgcgccaatggacattaatgttcctgttgggatattagtggaagaataaccttgtagttttccgataacatctgggatttttgccacgtcaccaacatcaatcgcctgttctttcaaagcttctaatacttgttgttgacgacgaattcgaccgaagtctccttctgcatctttacggaagcgagcatattgtaacaatgttttaccatccattacttgttcgccttttttaatgtttgcgtcaatatttttcgacatatctttctctgcgttgattttgattccttctggtgcaagtgtatcaacaatcttagggaaaccttcaaaattggctactacataatattgtacgtctactccaaaattttctttaatcgtttggcgtacaagttctggtccgccgtatgaatatgctgcattgattttgtttttgccgtgtcctggaatatctacgtatgtatcacgcatgatcgataccagttttggcgtatttgttttcgtattataatgagcaatcatcaagctgtctgaacggccttggtcttcaccgcgagagtcactaccgataagtagtacattgatttcatcgccaactgccttggcaccattgaatttgtagtcttttaatttactttcattttgcgcttcttttaagctagattgatattggaaataacctataactgcaactacaccaactaaaattaatagggctacaagaatcgtaacaaaaattctacctttgcgcgcttttcttttttgtgcatgtcttgccatatttcacacctcttttattgtaacttacttccatattacaataaaatgacaaaaaataggagcgataattccataagattttttaaagattggaaaaagccccctaaaatgatgatttctagagggctcgcaaatattaaagggttccgtcgctgcttgtagtactatcacttgttccagagtcagaactatcatctgaactatttggcgcttggccaggttcaccggacggcggcgttccactcggcatctcccctccaccaggaccttgcatggttccattagtattattttccggggtattttgactaactgaatacagctgataacttaaaacactaataattatgacagaaagaatactgacaataatcgtgctccacttccatttattgtggatgcctttcccacgaataatgaccttcttttctggttgttccatctcttccatccaacatcatcctttcgttaccactactttaccaagcaaataagaacaaattatgacatgaattagaaaaaaatatgtcgggcaaatctaaagttttctttaattttttcaacttttttagaagtgtttggtataattaattgaatataacatgaaattaaggggtgtattatggctagttatggtgggaaaaagaggaataacaaaaaagcaattatcattggaagcattgccgctgttgtcgtcctcgcaggcattgccatttactttttcattcaaaatcaacacaaagatgaaaaaaatgctttagcagccgcagaaacttttacatcaaatatcgctaaagaaaagtacgacaagttgggaagtagcgtctcaagtgaatccttgaaaaaagtcgaatttacaaagaaagaaatggaagataagtatcaagctgtttacgacgggattggcgcaaaagatattaaagtaaaaaatctaaaatctgtctatgatgacaaagaaaacaaattcaacttaacatacgaactagaaatgcggactagcctcgggaaactcgctacacaaaaatacaaaacgactatttccaagcaagatgatgactggaaaatcgactggaaaccagctctcattttccccggaatggtgaaaacagataaggtgcgcatcacggaagacgaagtagagcgtggtcaaatagtggacagaaatggtaatccactcgcgactactggtcaatttgccgaagctggtgtagtgccttcgaagcttggtgaaggcgacgagaaagtgaaaaacattgcggatattagcaaaaaactagaagtctccactgattacatcaacaaacagctcgatcaaaaatgggtccaagcagatagcttcgttcctttagttacattgaataaagataatctacctgaggctactggacttacgtatgctcaaaaagaaatgaggacgtacccattaaatgaagcaacctcgcatttgattggctatgtcggtgaagttagcgccgaagacattgaaaaaaatccaaaactcagcgttggcgatgtcattgggaaaagtggcttagaacgttactatgacaaacaactgcgcggtaaaaatggtggcgcaattaaaatcatcaatgaccaaaccaagcaagaagatactttacaaaaaatcgataaaaaagatggcgaagaaattaaactaacgattgatgcagccgttcagaagaaagcttttgatagcctcggttccgaaactggcgctgtgaccatgattaatccgccaaatggcgaactattagcgttagtaagcaccccttcttatgatgccaaccaaatggtgctagggatcacttccgaagattacgcaaaatataatgacgacaaacgcctacctttcctagcaagatacgcaaatcgttacgcaccaggctctacctttaaaacaattacagccacaattgggctggacactggcgttacaaaacccgacaaagtccgtgaaatttctggcttacagtggcaaaaagatgcttcatggggcaagtattttgtcactcgtgtccatgatgttccaaaagtaaatatgacggatgcgcttgtgcactctgataacatttacttcgctcaagaaggtctagaaatcggcaaagataaactaactgctggcttgaaaaaattcgattttgataaggaatataacttacctttcacaatgaaaccagcacaaatttcgaatgatgggctgaactcggaaatattactagctgacacatcttacggacaaggtgaattactgatgtcgccaattcaacaagcgattgcatactcggccattgcaagcgacggaaaaatgccttatccaaaactagatacaaaagaaaaagctggcaaggaaacacaagcaaccgaagccgcttctgccaaccaagtcaaagcagctttagtcaaaactgtttctgatccagctggtacagcacacgccctacaaatccaaggtcatagtatcgcagccaaaaccggtacagccgaactaaaagaaaaacaaggcgaagatggccttgaaaatggttttgtttacgccttcgatgccgacaatcccaattacctcatggtaggaatgattgaaaacgtcaaaggtcgcggtggtagcggacttgtaattgataagctaaaaccagttattgaaagtatgtataaataaaaaagagccattctgttcgcgaacagaatggctctnttttgttaactntcatgggttaattcagtaatttctccttttgtattaaaacgaacaactaannagtcatcgctaacttctgggtatagtttgaaatcgaatgttaaatccaactcatta

SEQ ID NO: 3699 - DNA, 2931 bp, Listeria monocytogenes 4b
  misc_feature (1)..(end): n can be any nucleotide: a,g,c or t/u
ctatggcactctcagcatctcgacggccacagtgtgctggaaagacttaatgactacattctctttaccgagtagctcttctaacgcttcttgcagctcatttgatggcgttacttgaatatttttcagctcagcagtttgtttcgttattgcttgatgcacaatgaccttactgtcgcctttataacgcgttaaaactggcttaatttgttccatttgctgtggttccgttaattttaggaacaatcgtacgggggcttttatttcttttaaatcttctgctttattgataattaactgtagctctccgttccttgtgtctgctttgacttgcaaaaagagaatctcccctttttgtgcaaagctcgcgaatttacgataactttccgggaacatgacggcgctcagttcttttgaatcatcactaattgttaaaaagcacatcgtttcgcccttttttgttctaattgatttgacttcatgtacataagcagctacttgatagtttttgccggaagaaagatttgcaagtcttgtaatagcaagattttgtaatttattttggtagtacgatactggatgcgctgaaacgtattgacccgtgtataatttttctttctccagcttttcgtcaatcgaaatgggcgcggttttccggtagcgtggtttcatctttttcaaaaagtcatcatcttccgcgaaaagattcattcctttcgaatcttcaccgagtagcgaaatatattgtagcactgcatcaatggttgccaaaatcgttgctcgatcctcgccaaattcgtcaaaacacccagaaaatacaagtgcttctaaaacggtttctgagagcattttatgtggcattctttcacaaaaatcaaagaaatctcggaaaggtgctttttttcgttcgttaataatttctaaaatgaatttcgttggcactttacgaataacacggaaactatagcggatagatgattcattctccacttggaagtagtaattactatggttgatgcttggcgctaacatgctaattccgtagttttttgcttcggtaatgtactgggaaattttgtcgtcattgccaaaaacagagctaagaagcgacgacataaatgcagctggaaaatgtgcttttaaataagctaattgaaaagcgatttttgaatatgctgcagcgtgacttcggttgaaaccgtaattcgcgaattgaacaatcatatcatacacttggttagcgctagcatctgaataacctctactcttagcaccttccacaaagtgaattcgctcttcgtttaggacatctgcttttttcttgctgaccgctcgtcttaataaatctgcttctccaagcgaaaatccagccatttggttcgctacttgaataatttgctcttgataaacgataacgccgtatgtcacttccaaaataggcgctaaatctggatgaggatattgaattttttcttttccgtgttttctagcgataaatgtatcaatttgttccattggacccggacgataaagcgcatctaccgccacgacatcttcaaaagaagttggttttaattttcggagcacgcgtcgaatcccgtccgattcaaattggaatacccctgtcgtgtcacctgtttggaatagtttcaatgtttttttatcttctaaggaaatatctgctaatgttaacggagtttctctagtataattgactgatttcaaaacacgatcaagtaaactaagatttctaagtcctaaaaagtccattttaagtaagccgattttctctaattctcccatagcaaactgggtcaaacgtgcatctccgctacctaattgtagcgcgacttgttctacgagtggcttgtcactaataactattccggctgcgtgcgttgaaatatgacgtggcaagccttccagttgacaagcaacttcccaaatcatttcattttctttagagcttttaatatggttttctaaacgcggactttcttgtagtgctttttgtaacgtaatacctaactgacttggaatcaacttagaccattcagataatagtacagaatttagcccaaaactcctcgcagtatcgcgaatcgccgcttttgccgctagtgttccaaacgtgccgatttgcgccacatgcgcttctccgtatttagataccacatacgaaatcacttcatcccggcgattatctggaaaatccaaatcaatatcgggcatcgtgatacgttctgggtttaaaaatcgttcaaatagcaaattgtaacgaattgggtctacatccgtaattctgagtgcataggaaacaagcgaccccgccgcagagccccgacctggacctgttaaaattcccgcctcgcgtgaataacgaataacatcccaaacgattaaaaagtaatctgcaaaacccatttccgtaatgacttttaattcatattctaaacgctcctgatattccacacctaataaatttcgttcttttaatcctgcaaaggctgtttgacgcaaaacatctgatgcattttgtccttcatttaatggaaatctaggtaataaatgctgatccaaagcaatttcgacatgacaacgatctgcaagttcaccagtttctaagcatgcccgtttttcgaactccgtttgccaatcacgttccatgtcttcttgtgaggtaaaataatttggtccagcaagtggtaacgttgtccaatcgaccgttcgattatcacgaatggccgttaaaacttcttttgcttgcgcatcttttggttctatatattgtacatttttcgtcgcaacaaccggtacattttcttctgcagaaaaagtttctatttttgtgaaaagacgtggattttctttttgggcagataaataaacagattctttaccaaaaatttcgactaaatttgcataaacttc

SEQ ID NO: 3700 - DNA, 2729 bp, Listeria monocytogenes 4b
  misc_feature (1)..(end): n can be any nucleotide: a,g,c or t/u
gatacttgggtgaaactactcgctgcttgagcggccgacgtgtgctggaaagctggctcattaacagcagtcggatccactgcacttcaaccacttgttgaagcagcttccaaagaatttattaacactaaccctaaagcacaaatcaacgtgcaaggcggtggttctggaactggtttaacacaagtacaacaaggcgcagttgaaattggtaactcggacgtattcgctgaagaaaaagatggcgtagatgcttcgaaactggttgaccatcgtgtagcagttgtcggaatggctccagtagtaaacaaagatgtaggcgttaaaaacattacaaaacaacaattaatcgatatcttcactggtaaaactactaactggaaagacgttggcggtaaagacgaaaaaattacaatcatcaaccgtgcggaaggaagcggaacacgtgctactttcgaaaaatggggacttgatggtaaaacaccagttaaagcacaagaacaagattcatccggtacagttcgtaaaatcgtaagcgaaactccaggagcaatcagctacctagcattctcttacattgacgcttccgtagttggactttcattagatggcgttgaaccaactgaagataaagttgcaactaacgactggaaaatctggtcttatgaacatatgtatacaaatggcgaaccaaaaggcttaacaaaaacgttcttaaaatacatgacttctgatgaagtacaaaataatatcgtaccacaacttggttaccaatcaatcaaatccatgaaagtggaacgtgatgcatctggtaaactaactgacgtaaaataaaaagaatgaaatgggcgtctatcctagtaataccgggatagacgtatacccatgttaggagtaaacatgggaggagaaaggagcttacgtgacttggaagcgataaaagaaaagaagcttacacaaacttctaaaaaggcgcatctagaaactagaggcaaaattattacattcatctgtatttcaatcatggttattgccgcagcgtctattttgttttttgttatatcgaaaggtttagcaacatttacagttaataaagtgtcttttgttgattttataactggaacagactggaatccttcgcaaaaagatgcaaacggaaatcctctagttggcgctttgccaatgattattggttcttttgcagtaacgctttttgccgcttgtattgcaggaccacttgcaatcggtgcagccatttttatggtggaaatctcacctaagtttgggaaaaagattttgcaaccagttatggaacttttagttggtattccatctgttgtttatggattcattggactaagtgttgtcgttccatttattcgtgaccatatttcgggaagtggctttggtattgccgctgcgaccgtagttttaacagtaatgattttgccgactgttacttcactcagcgtagatgcgattaaatctgttccacgtcactaccgagaagcttcgttggcacttggcgcaacacgtttccagacgatttggaaagtagtgcttcgtagctcgcgttcaggaattttgacagcgattgtattcgggatggctcgtgcattcggtgaagctcttgctgtacaaatggttattgggaactctgctgttattccaacctcattatttgagccagcttctacattaactagtattttaacaatgggtatgggaaatacagttatggggacgcttgataataatatcctttggtcacttgcaatggtgttactcgcaatgtcactatttttcatcattgtgatccgcttcatcggacgtaggaggaaagtcaaatgaatgtaaaaacaaaagataaaatcgcgacaggcgttttctatgctattgctgtattaattgtcattattttagctggcttacttggctatattttagtaaaaggtgttccgcaacttagctggaagtttttgacgaccccaccacagtcgttccaagctggcggcggaatcggtcctgaaatctggaattcattttatatgctcgttattacgatgattatttctgttcctatctcgctcggtgcgggaatttatatggcagaatatgcgcgtaaaaattggattacagatttaattcgcacaacgattgaagtgctttcctcacttccatctattgtcgtagggctattcggtttccttgtttttgttattcaaatggggtggagcttctcggttatttctggggcgcttacactaacgattttcaatttaccattattaattcgtgttgtcgaagaggcacttaatgctattccaaacacgcagcgtgaggcagggcttgctctaggtttatccagatgggaaacaatcacgcgagtacttgttccagccgcactcccggcaattattaccggagttatcttagcagcaggacgggtatttggtgaagcagcggcgcttattttcacagccggtcaaagtacacctattcttgatttcactgactggaatccggtcaatccagcttcaccactaaatattttccgcccagcagaaacattagctgttcatatttggaaaattaatggtgagggaattatgccagatgcacaagccgtttctgacggagcttctgcggtattaattctttccgtattacttttcaacgtcttagctcgcctgcttggaaaatttgtttataaacgacatgacctcgtc

SEQ ID NO: 3701 - DNA, 2692 bp, Listeria monocytogenes 4b
  misc_feature (1)..(end): n can be any nucleotide: a,g,c or t/u
gcaaccctcgaccagaccatcaggaatgaaaaaggagaaataacaatgacaaacaaagaaaaattcactggttttgatttttccaccaatccatacgaagaagaagcaaaaaaacgttggggcgataaagtagtagaaaaagccaatgaaaaagtaaataatatgaacgaaaaagaaaaattaactttaaaagaaagtttcgacgcagaatttcgtcatttagcatctgttcgagaactctctcccgagtcagaagaagcccaactcgcaattgaccattttttccattacttgaatgacacccacggcaatatttattccctagaagcctttgctgatcttggggaaatgtacgttgctgatgagcgcttcactaaaaatatcgatcagttcggtgatggcctttctcacttcctcaaagaagccatgaacatttatgccaaaaacaaataaaaaaagccacgatttcttaaaaagagatcgtggttttatgattggtataacaaagaacggggtaaatagtataagatttcattaatatgtatttatgatgtaaaataaagaataaaaatacatttcaagggaggaacttatgtttaaacacatcttgctttcactaaatgggtacaaaatatcctatttacgaaatgatgtcatttcaggcgttggtgttgctgcactgacgattccagttgcaatgggatatgcacaagtagcaggacttccacccatttatggattatatgcatcatttttaccggttattgcgtatgttatttttgccagttcaccacaacttgttttcggaattgatgcaacggcaagtgccatcacaggatccatcattttaggaacagctggacttgctgccggatctaaagaagctatcgcgctcgccccaattctcgcattcttttgtgcaatatttttagttcttttctccgtattaaaattaggacgtttcgcaaaatacatatcagccccggttcttagtggattcatttccggacttagtgtctccatcattatggggcaaattcctaagataatgggcctaaaagaaagcggagatagtttcttctctagtctaggcattattttcggacagtttttccagtccaattggatttcatttgccatgggcgtggttacagtcattattgttatcacttgtaaaaaagttataccaaaaatccctatgtctcttgtagttttagtacttgggacaatggctgcttatttctttaaattagatcaatataatgttgatattgtaggtaaaattccagttggcttcccttcactagcgctacccgattttggtgcaagttcgtgggcactcgcgattggcggcggtttagtatgtgccatcgcaacttttgccggttcgcttttaccaagtgaaagttttgctatgaggaacaaatatacgattgatgataatcgtgagttatttgcttatgggatttctaatttcgtcgctgcgttttctggttgttccccagcaagtgccagcgtatccagaactgctgctaacgaacaatttcgtggtaaaacgcaaatggtttctatcgttgctgcgaccattattgcgctaatcgttgccttcttaagtggcttactttactatatgccgcaaccagttctttcaggtatcgtatttgctgcccttgtaggtattattgatgtagatgtgttaaaaggtttattcaaagtttctcgtcgtgaagcaactgtttggattgttgcagcacttggtacccttttagttggcgttattttcggggtactacttgggatttccctatcattcattaacgtagtaagtcgttcgatgaaatcaccaatgnccattcttggagtgatcgaaggacgccacggttatttcgatttaaaacgtaaaccagaagcaaaaccaattccaaatgttgtcatttatcgttatagcgcttctcttttcttcgggaatttcaacaaattcgcagacggattaaaagaagcagttcaagatgatacaaaactagtcatttttgaagcgagtgcgattattaacattgatacaaccgcaaccgaatctatgaaagacttgctcaaatggcttgatgacaaaggcattgaatattacttcgctgacctaattgatcatttgaaaaccagctttagaaaacatgatcttggctatattatcgataacggctacacgaagaaaaccgtggaagacgcgctcgaggcttattatgccgaacataaataacaaaacgcttagccgggcctaaactcgactaagcgtttttcatttttacaaaagcgcaaaaatccgcggactaattaaccgcacaaacggtgacacgataaaaatttgcaaaaataaagccacaaaataattgcgcaaaataagaatacctagatgactccattcgccttggttcacaatcaggctaagcgtcgacgaagacacacacataaatgtaaccatcaacaattgcatcataatgatctttttaaatttcgaagcatcttcactaaccaaatgggcgtgtagacgatacacaatttttccgacaacaaaaaagtctaataaaaatccaataaaaaccaaccggacaaatgcatttaaaataatcctttccagcacaaagcagccgtactactggtacgagcagctacgtagcggcatactgccaagcaatag

SEQ ID NO: 3702 - DNA, 4381 bp, Listeria monocytogenes 4b
  misc_feature (1)..(end): n can be any nucleotide: a,g,c or t/u
aaaaacacacccagcaaaagctgagtgcgcaaattatttcgttcgttacatacagtcttatttgagaccgtattttttgttgaagcggtccacacggccgtctgcagtcgcatgtttttgtttaccagtatagaacgggtgcgaatcagaagagatttcgacacgtagtaatggatactcgttgccatcttcccatttaattgtttcgcttgagctcttagtagaacctgacaaaaatttgaaatcagtactagtatcaacaaataccactggacggtactcaggatgaattccagttttcatttcttttcaactccttcgccctgaatcatctgaaacagagtaattaagtgcttttacacacagtatagatattataacaatgttgaagcaaacaagcaagattatttttgcactttaaagattatccatttgctaaacacgtagttcagtacaagcacaataatattggtccagattttcgcccataattcgtctacagataaataactgattaacagaatcatgactaaaatatctattatataggttaaacaacgaaaaccaaaaaatgaactcgcttcacggaggcggtctttccaagttggtgtataactatcaaaaacaaattttttattcgaaaagtaggcaaaaagtactgatgcgataaaagcaatggtatttgcaatacgataatcccagttcaaaatatatgtacatagccaaaatgttactatattaataatggtagtaaatccacccattattaaatacataaaaatactgtgtacctgatctgtgtaccacggaattttatttaataattgtcttattttgctcataaaataacttctttctatgtgaaatttttgatttattttttaaacatctcttcttgtagtaactcataaaaagcttcattattctccgttttcttcaaataacgtacaaatcgttctgaaatatctagtccatcgctttgtttcggcatcgctttgcggattttccagagttgttcaagacgctctttggatagtagtaattcttcttttcttgtgccggagcgacgcatatcgatagcaggaaaaacgcgacgttctgcaagttggcgatcaagatgtaactccatgttgcctgtccctttgaattcttcgtaaataacatcgtccattcgagaacccgtgtcaactaatgctgtggcaagaatggttaagcttccaccctcttcaatattacgagcagctccaaagaagcgcttcggtctatggaatgcagcaggatcaatcccccctgaaagtgttcgaccacttggcggaatcactaggttataggccctcgcaagtcgcgtaatactatccattaaaatgaccacatcgcgtttttgttctactaaacgcatcgctcgttcaagaaccagttctgctactttaatgtgattttcaggtacctcatcaaatgtggaactgacaacatcggcctttacagaacgttcgatatcagttacttcttccggacgctcatcaattaacaagacaatcaattctgactctggatgattagtagtaatcgcgttcgcaatttctttaagtaataccgttttacctgcttttggtggagctacaataagtccgcgttgaccaaaaccaattggtgaaatcaaatcaatcgttcttgtggaaataggatttttgcctgtttctaaatgaatttgacgatctggataaagcggtgttagtcctgggaaatgcactctttctttagccacttcaggattttctccattgacagcctcaacatggagtaagccaaagtaacgttcattttctttcggaggacgaacttttccagaaaccttatccccagttcttaactcgaaacgtctaatttgggaagcagagatgtaaatatcttccgaactagatgaatagttgatagggcgtaagaagccaaaaccttcatttggaataatttctaatacaccttccatgaagaaaaatccttctttttctgcgtttgattttaataaagcaaaaatcaattctcgttttgttaatttactatagtaagtaattttgtgttcttttgctaaggcatatatctctttgattgttaaactttctaagtatgcaatggacagtttagccatatatgtaccacctttttgagttaataaatagtatttaggaataaatgataatggagggatttagagggaaggctgaaacgacttgattcgttcagcctcattttttataattttgtttctgctgcgctactacgagtaatatttgcgccaatagcagataatttttcaataatcttactgtaaccacgttcgatatgttccaccccgtgaatttcagtttctccgtcagctaaaagtgctgcaattacaagcgctgcaccggcgcgtaaatctgtcgctgtcactttagaaccttgaagttgcacaggaccatttatgacagccgaacgaccttcaagtttaaacttaccgcccattcgttcaatctccgcaatgtgtttaaaacggcttggataaattgtatcagtgatgacactactaccttccgcacgtgttaaaagagcagttaacggttgttgtaagtccgttgggaagcctggataagcgtaagttttaatatctactttttttattttttctacttccccaacaaaaatagcatcttcttcgatatccattggaacgcccatttctgtgagctttgcaatgattccttctaaatgggtaggaataacattttcgattcgtactcccttcccagaagctgctgcaagtaccatgaatgtccctgcttcgattcggtctggaataattgtatgatgacaaccatgtaaatgctctaccccagtgattcgaatagtatcagttcctgcacctttaataattgctcccatatttgttaaaagcgttgcaacatcaataatttctggctcttttgctgcattttcgataaccgtttttccttttgcacgaacagccgctagcatgatattgattgtcgctccaacacttacaacatctaaataaatccgtgcacctttgagttcatcggcacgcaaataaatcgcaccttgctcgttcgttacttttgcgcctaatgcttcaaaaccttttatatgttggtcgattggacgtggccctaagtaacaaccgcctggaagtccaataaccgcttttttaaaaaagcctaacattgcacccattaaataataggacgcacgtaatttcttcacatttcccgatggaagtggcatagaaatcatatctgttggatcaataactgctgttttattatcatagcgaaccgtgccgccaagctcttctaaaatattataaagtgtgtgaacatccgaaatatctggtaaaccttctaaaaccacttcagactccgccaaaattgccgctggaattaatgccaccgcactattttttgcgccatccacttgcaaagtaccagctaattttttaccgcctcgaataatcaatttatccgtcacaaatgtacccttctttcttgaagcatgtaatactgtttcattatccattaatttgttttactttgcaagaaatgctttccctaaaaagctgggaacattacgtcccaagcttttaatcattgtggtatatttttggctggtgcttttgcgagtgctttgatacgcggtttaatttttttcgaagctgtatcttttattaataatgcgcccgccccgaaaacgatgcagctataataagtaataatccgccataaaacaagtgccattaggagttttgccggaccgagtaacataccgaataacaaagtgaaagtatactcagctcccccagccccacccggcgttggcatgactgtcgcaaacataataataaaagcatgatacgtaatcgccatatacaggccaattcctgtcacaccaatcgcttgtaaaataaagaaagggattgagaagtaaatccaaagttgcaacgttgtataaaaacaacaacgaacaattaatttccaatctttaccaattcggctactttcttcatggaaagtaataattttctcatctaatgtatttcttaaattagaaactttttcttttttcataaataaacgtgttggtataagtaaaacgtgcactaattttgtcgtgaacttttggcttcttcctactaaaataagcgcagcgatgacaataacatgcacaccaaaccctagtaaaacaaggaatttcaattgtgtcacgccagtcattaaataatgaataccaaaaatcaagataactaaaaagttcagtacgaccatcgcttggtaaataatgaattttacaagtaagactgaacttnctcgccccgcatccatgccttgct

SEQ ID NO: 3703 - DNA, 3641 bp, Listeria monocytogenes 4b
  misc_feature (1)..(end): n can be any nucleotide: a,g,c or t/u
tagatttgttacatacactaaccgctgcggtcgaagcaaaaactggcttaaaatctaaacaagacccaggaaatatgcgtcgtcttgatagcaattattttgatcgtattgctgccattgaatttgcagtaaaatatgatgattgtaaagatccacgtggcctattagatgcagatattgttcttgttggggtatcaagaacgagcaaaacccctctgagtagctttcttgccaatcaaaattggaaagttgctaatgtaccacttgttcccgaaattccgattccagctgaacttttccaaatcccagcggaacgtattatcggccttacaaccaccccagaaaaactagcgcaaattcgcaaagtccgtttaaaatccattggtttagacgaagcaagcagttattccagtgaaaaacgcattttagaggaactagaatatggttatgacacattcaaaaagcttggctgccaagtcattcatgtagaagataaagccattgaggaaaccgctgccctaatcacggaaattatcacgagttaccactaatttgaagaggtgaataatgtgagaaaatttgtctatcagttcagtgaaggttctaaagaaatgaaaaatattttaggaggaaaaggtgctaatttggccgaaatgacgaatatcggtttgcctgtgcctcctggttttattatctcgaccgatgcctgtaacgattacacggcaaacaataaacacctttccgaagctatatttgaagaagtaaaaattcatttagcagaactggaaaaacaaaccgggaaaattttcggatttgcagaaaaccctctactcgtttccgttcgttcgggtgcccctttttcgatgcccggtatgatggataccgtgctcaatctcggtttaaatgaccaagccgcagaagggctcgccaacttaactggtgatgctcgttcggcttatgattcataccgccgttttattcaaatgttcggtgacgttgtttttgaaattccaagctaccaatttgaacaggctcttagtcgcatcaaaaaagcaaacaactaccgcttagatacagaattaactgcgactgatttaagcaatctcatcgatgcttacaaactaatttttagccaagcaactggtatagactttccacaagatccactggaacaactgcggcttgcgataatcgctgtttttgattcctggatgaatcctcgcgctgttatttaccgcagattacatgatattaatgcaagttttggtacagccgttaatattcaagcgatggtttttggaaacactggagaaacgagtggaactggcattacctttacccgcaatccttccaccggtgaaaagaaggtgttcggggaatttttactgaatgcgcaaggtgaagatgtggttgcaggaattcgcacccctgagccgataagtgcgctggaagaaagaatgcccactgtttacaaggaactcctccagacttgtgaacttctcgaaaatcattatttagacatgcaagatattgaatttaccatcgaaaaaggcaaactctatgtcttacaaactagaagtggcaagcgaacagccaaagcagctattcaagcggccattgattttgtccatgaaggaaaaatcactcgtcaagaagccattatgcgtgtggaaacaaaacaactaaaccaattacttcatccaacttttcttgaaagcgctcttaaaaatggtcaagtcatcgcaactggtttacctgcaagccctggtgctgcaacggggcaaattttctttgaagcaaaagaagctgtccaagcagccgaacgtggcattcctgtcattttagttcgtaatgagacttctcctgaggatatcgaaggcatggcacggagtaacgctattttaaccgctcatggtggtatgacttctcacgctgccgtcgttgcccgcggaatgggaaaatgctgtatcgctggatgtgccgaacttactattaatgaaaaagataaaacgatcattcttcctactggcgacacactgcatgaaggtgatgcgctctcccttgatggtagttccggcaaagtttaccttggagaaattgccctcagagaagcgaaaattggtggtcattttgacgagctgatggcctgggctgatgcggagaaaagattaatgattcgagtaaatgcagataccccagcagactttaaaaaagcgcttttatttggtgcggaaggtattggtctttgccgtaccgagcatatgttttttgatgaaaaacgaattccttatgtacgccaaatgattttagcagaatcattaaacgagcgcgaatctgttttagcaattttaaaagaaatgcaaaaagccgatttcaatgaattattccgtattgcagacggtcgttcggtaaacattcgcttgcttgatccacctttacatgaatttttaccaacaatgaagcaagaaatagaacaattggctggcgcgatgaatcgaaccgttcctcaaattacaaaccgaatcaacggactaagagaagccaatcccatgctcggacatcgtggttgccggcttgctattacgttcccagaaatttaccggatgcaggcggaagcaattatcgaaagtgcaattatcgttcataatgaaggaatagatgttcacccggaaatcatgattccactcatcgctacgaaaaacgaacttagctatataaaaaaagaactgcaacaagcagtccaagctatttttgatagagaacaagtggtgattccctatgatatcggaacaatgattgaaattccgcgagcgtgtgtaactgcagacgaaatcgccgaggaagcagcgttctttagctttggaaccaatgatttaacacagctcacttatggtttttcacgtgatgatgcgaccaagttcctagccgattattatgaaaaagatattttacctaaagatccatttgtttcgattgataaaaatggtgtcggcgcactagttgaaatggcagttacacgtggacgaatgacttcggaacatttaaaaatgggggtttgcggcgaacatggtggcgatccggaatctatccagttcttccatcaattaggacttacctatgtttcttgttccccgtaccgcgttcccattgcccgccttgcagcagctcaagcagcattagctgagaaacaattagttccaactatctaaaaaaagccagatgacaatcaaatagactgtcatctggctttttctcctattatttttcacaaatcgcaaagtaatttccttcgttatccgaaaaattgaacacccggcccattggtaaatcgaccaaatcaccaaccgtaatgcctttatctttatattcttcataaagttctgcgacattatttccaaatagtaaaatagatggtgtcccaagattcatttctgggttcatttccgccactttctttttgttttgaagaacaaaagtagtttctacaccttttgttggcgctatctcaatccactgaatttcgccatttaccacttcttctgaaactacgacaaaatctaatttttctacccaaaaatctctcactgcagcttgattttctacatataacatcacttgaccaattttttcaaccatcgttc

SEQ ID NO: 3704 - DNA, 3128 bp, Listeria monocytogenes 4b
  misc_feature (1)..(end): n can be any nucleotide: a,g,c or t/u
ttaactatgcaaggagagacttgagatgaaagtattagtaaataaccatttagtggaaagagaagatgccacagttgacattgaagaccgcggatatcagtttggtgatggtgtatatgaagtagttcgtctatataatggaaaattcttcacttataatgaacacattgatcgtttatatgcgagtgcagcaaaaattgacttagttattccttattcgaaagaagagttacgagcgttacttgaaaaattagttgctgaaaataatattaatacaggaaatgtctatttacaagtgactcgaggtgttcaaaacccgcgtaatcacgttatgccagatgatttcccgctggaaggcgttttaacagcagcagctcgtgaagtaccaagaaatgaacaacaatttgtgcaaggtggaccagtaattacagaagaagatgttcgttggttacgctgtgacatcaagagtttgaatttacttggaaacattttagcaaaaaacaaagcacatcaacaaaatgcgttagaagctgttttacaccgcggagagcaagtaactgagtgttcagcttccaatatttctattattaaagacggtgtgttatggactcacgcggcagataatttaatcttaaatggtattactcgtcaagtaattattgctgttgcgaaaaagaatggtattccggtcaaagaagctgattttactttaacagatcttcgtgaagccgatgaagtattcatttcaagcacaacaatcgaaattaccccagttacccatatcgacggagtgcaagtagctgacggaaaacgcggacctattaccgcaaaacttcatcaatattttgtagaagaaatcgttcaagcatgtggcgaattagaatttgcaaaataataagtagaaaccttccttttttaggaaggtttttttgcgtcttgatacctatgtaaaaatttatataacttttttatccgttgaaattacgccattggctccgctttcagtttgaaaagcctggttttaagcgattgacaaatttttttggaggtgtataattcaaaaggctaatagttcgcatgcgaaatatttgggagcgaacaatatggagggaagtcatggatgaaaaattagtgaaagaggttattttctcttttcgcgaagtacaacgaaaaacacatcacgtgcttgcagaagaagcggcgaatagggagattacaacaacccaattacttgcaatcagagaattacaaaaagaatcagaattaacacttggcgaattagcagaacgaatgaagcttggtaaaagtactgtatctggtattgtagatcgattagtgaaagcgggatttttaaaacgtacaagaaatgaaagtaatcgccgcgcactcgggttagaattaactgaaaaaggagctacaaaagcagcagaaacgtatcatgtattcttcaaccgtttagaacctatcttagagattggcgaagaaaggttaaaagaaatgctagaaatgcaccaagagattattaccattttagaaagggaaggtgcacgagattgaatatgaaagcagcaagtacatcagtgaagcgtaatggtattttgattgttatgcttatgggcgcctttgttacgattctcaaccaaacgttgatgaatgtcgcgctaccaagtattatgaaagattttggaattacagccagtcaagggcaatggttatcgactggatttatgttggttaatggtgtcatgattccaatgacggcctttttaattgaacgatttacaacgcgtcagctttacttatttgcgatgattacctttgcgattggtactgcaattggcggatttgcgacagattatacgatgcttattgctggccgtatggtacaagcaattggggctgggattgttatgccacttcttactgttgtggtcttaaacttattcccgatggaacgaagagggcgagcaatgggcttaattggtcttgctatgaactttgctccagcaattggtccgacactttcagggtggattgttcaacaatatgattggcgcaatttattctttattattattcctttcgcgattcttgatattgtcgtagcgattttcttacttaaaaatgtcggaaaaagaactttcccgaaactcgatatccttggggttatcatgtcaacagtcgggtttggtagtttattattaggatttagtaatgctggagaccatgattggttaacatggaaagtagctggatttattattcttggtctagtagtgctaggaatatttattcgttaccaaacaagcaacaaagcgccactacttaactttagagtatttaaatatcctacctttgcgcttacaacagccattagtttctttgttgtaatgggcctttttggtggcatgttattactaccaattttcttacaaactgttagaggattttcaccactagaatcggggcttgttctcttgccgggtgcgcttgtcacggcgatactttcacctgtaactggggtgatgtttgaccgttttggggctaaatatttatcacttgttggcttaattatcatggcgggatcgaccttcatgtttaccaacttggatgaatctactacattgacttttattattattgtacaaacgattcgttcggctgggatggcgatggttatgatgccactgcaaacagcagcgctcaactcgcttccattaaaactagcatctcatggttcagcaatgtttaataccatgcgtcaagttgctggttcaatcggaacagcggcgcttataacggttatgtctaaaagtgctgcgagtttcgctactaagctcggaccagccgatgtgattggcaaaactaaaactgatattgccaaccatgttcttatccacggaattgaaacggcctttttagttgccggaattctttctgtagttgcttgtgtcctagcactatttatacaaaaaaatagaagtgccatggatccaattgttactaaaaccgaaaaagcataaaataatgaaaaaagtgtgttccattttgatggaatgcactttttttgtgtaaataaagtaaatttgtaaaaaaatctcgatacacgaacatatgttgacttgact

SEQ ID NO: 3705 - DNA, 2803 bp, Listeria monocytogenes 4b
  misc_feature (1)..(end): n can be any nucleotide: a,g,c or t/u
ggcggccagcagtgtgctggaaagggttgtagtaaactgaaagtaaatcacaagcttgaaggacttgcctaatttggtgaatattacggcagatagctgtgcgattgaagatttaggaacactgaataatttaccgaaattacagacattaattctctcagataataaagatttaaccaatattaatgcaattaccgatatgccacaattaaaaacattagccttggatggctgcggaattacatctattggaacgcttgataaccttcctaaattagaaaaattagatctcaaggaaaatcaactaactagtataagtgaaataaacgacttacctcgattaagctatttagatgtaagtgtaaattatcttacaacaataggggaattaaaaaaattaccactattagaatggttgaatgttagttcgaataggttatcagatgtgagtacactaacaaatttcccgagtttaaattatattaatgtatcaaataatgtcattaggacagtcggtaaaatgactgaattaccttcactgaaggaattttacgctcaaaacaacaatatatcagatatttcgatgattcacgatatgccgaatttaagaaaagtggatgcgagtaataacttaattacaaatataggtacctttgataatttaccaaaattgcaaaacctagatgtgcattcaaatagaattacaaatacatccgttatacatgatttaccaagtttggagacgttttatgcgcaaaataatttgattaccaatattggtacgatggataatttaccagaattaacttatgtagatttatctttcaacagaataccatcacttgctccaattggcgacttacccaagttagaaatattaaaagttacagacaattattcttatttaagaagcctaggaacgatggacggtgtttctaagctgagaaatttagaattacaaaacaattaccttaattacactggaacagaagggaacttaagtgcattaagtgatttaacaaatctaacggaattaaatttgcgagataatggttatattagtgatataagtgggctttccaccctatcaagactaatctacttaaatttagattccaataaaattaaagatatttctgctttgtctaatttgacgactcttcaagaattaacacttgaaaacaaccagattgaagatatatcagcacttagtgatctggataatttaaacaagctagcactatcaaaaaataaaattattgatattagtcctgccgctaatatggttaatcggggggcgagtgttactgcgagtaatcaaacatatacattgccaactgtattatcatatcaaagctcatttaccatagataatccggttgtttggtatgacggcacaccactagcgccatcatctatagcgcactctggtacttacaaggatggggaaataacttggactaacatgaccgcagcctccagttccactgaatttaactttaataggctaaaagatggtttaaccttctcaggaacaatcacccaaccttataaatctgcagttaaagtaactgcaaatgcagagcaaacttatacaattggtgatactatttcagaggagcagtttttaaaagatgttaatgcaaaatcatcggacggagctcctgttacaagtgattttgctacagtggtggatttaaacacttttggtgaatatgaagttactctaacttctgaaaaagatggaatccaaggggatagttgcaaagtaattgtcaaagttcttcacggagcgcctgtcatttcggcagaccaaacaattaattatgataaacatgcgactattacagagaaacaatttttagaagatgttcatgcgagtacggatttaaatacagctattacaactaattttagtacagcagttaacttgaataaaggcggagattataccgttgcgctaaattctgaaaatgaggacggcgtgaaagctgaaacggtctatgtcactgttactgtagacaaagatccggcgccgattataagtgcgaaaactgacatcacttatgacaaattctctaaaaaaaccgaagcagctttcttagatgatatagacgcagatacaaatgatggctctataataacttctaactttgctacagcagttaatttagataaagcaggtgattatactgttactctgaattctattaatagtgatggtgtagcgtctacgccaactgcaattattgtccatgtggagaaagagaaaatagcaacgattagcgcaaatacggcacaacaatatgaaaaatatgcagagattaatgaaacgcaatttctaaaagatgttcatgctagtattaacgcgagcccaacaaccgcagttttggaaagtgattttgaaacagtagttaaactagacgtcccaggaacgtacacagtaacgattactgctacaaatgaagatggcggagtatcggcaccaaaagaagtttctgtcatagtaaaaaaacttccagcgccagaaatcactgctgataaggaaataacctatccgaaatttgatgaagtaagtgaagcagaatttttaagtgatattcatgcaactattaatgaaaaaaatgtaacgattacaagtaacttcagtgccgatgtgaatttaaataaagctggcgattacacggtaacattaaatgctacgaatgaagacggcgtaaaggctacaccggttgaagtaattgtacatgttcaacaaggagaacgtcctgttataacagccgatgcaactatttcctatgac

SEQ ID NO: 3706 - DNA, 3531 bp, Listeria monocytogenes 4b
  misc_feature (1)..(end): n can be any nucleotide: a,g,c or t/u
caccgtgcgctggaaattacaactgtggcgataaaataagcagtagatttcgtggtaattgctggagatatatatgatagtgaagatcaaagtgtccgtgctcaagcgcgtttttcaaaagaaatgaaacggttagaagtggcgaacatccccgtgtttatgattcatggaaatcatgattttatagaaaagcataaagaaaaactcacattaccaagcaatgtgcacgttttttcagagcaagtagaagtaatgtcgcataaaaccgccactggtgtgagcgttaatatttatggatttagttataatgaacgtcatattcgctcaagccgagtagataaatacaagattcaaggtaatgctgattttcacattgcgttattacatggctcagaagtatctagtagcgaagaacatgatgtgtacgccccatttcgtgtacaagaaattagcaaaaaaggttttgactactgggcactaggtcatattcataagcgacaattgcttgcagagtctcctagcatttattacccgggaaatattcaaggtcgaaatcgcaaagaatcaggtgaaaagggcgccagtatcattacattatcagaagcaagtacaaccattgatttcattggaacaagtccgattatttgggaagaagctgtaattaccttaccagaaaatagtgagataaatgccttttaccgagaaactactaagttgttagagagctatcaaggaagaagtcactcttattttcttcatataattgttaagatggaaaataaacaaaaaatcgatacgaatgattggttacaaatgcttcaagaagaagtagaaatcacagataacacatttgtatgggtacacaaattaacaacggagataacgaatcaaagtaattcacaaacatggtacgaatcacatttagcaggagaagaaatcaagcattcgtttgagacactacaagatgaatctgctttttatcaagcagtagaggctctgtatcttgaaagtggagtgagtagatacttggatgatttgtctgaaattgatcgtgagaggctactacatgatgctttaatggaattagggaggacgcttgcagaagtggaaggtgatgataaatgagaataacatctattgatatcattggttacggaaaatggtccgatgctcattttaataatattgccaatttccaagtattctatggtgaaaatgaagccggaaaatcaactattatggcttttatacatagtattttgttcggtttcccaacgaaacaacaatcgataccgcgcatggagccaaaaaacggtggaccatatggtggaagattaacactagaagacacacctttaggaaaagtcatcattgaacgcttgaaaggaaaagcaacgggagatgttcggatatattacggggatggccaaaccgctggagaagaaaaattaccagaaattatcggtgaaattgatcgaaacacttatgaggctattttttcatttgatatacacggactacaaaatattcatcaatggaaaaagaaagaatttgaacgctatttgttagcaactggaacaacaggatcggacgctcttctaaaggcagccgaagcattacaaaaaaaattagatagtctatataaaccaagtgggcgaaatccactaattaaccaacaactaaaaaaagtaaaagaagcccaacaagcttttcaaaacgcaaaaaaacaaaatgcgcaatatgaacaattaatcaatgagaaagagcaagcgatagtaagacaaacagagctacaaaaagaaaaaacaacaatgcgagttgagttagatgcattagcaacattagcggatttgtggccgttataccaagaatggaaagcactcagtaacaaagcttctgaaacaacagaagctacttttccgcctgatggagttattcgtttagaacacttgaatctccgagaaaaagaatggcaaaatcaacttatccaactagaagaacgccaaaaaaatctaattagcaacaataattatgaacatagtgctttttttgccgaaaatgaagcagaagttacttatctaatcgaaacttatgcagcttttggagagcgagaaatccagttaaagaatttaaagcaagagattaagtttcagcaagtcgacacaaaacaaccacttagaatatggtcgagcgaattagaacaaacaatgattcacttaaaagaaaaagaacagtcccacaaagagcaacaacatgatatccagctaaaattaaaattcactaataactccgaagaaaaactccaaaaaaagattgatcaaatagaagcggagatgtgggataataaaacattccaacaagcaaaagaaaaaatgcaggatagtcctaaaacttctaaaactaagacgatggtttccttgggcatatttgcagtagcgttcgtcttgatgatagttttccaagctatttggagtgtagcacttgtttttgtttctgcacttatagtgggttatgcttttattactactggaaaatcttctccaacaaataatgagcaaattctagcttttttagaacaaaagaaaataagacaagaatggcaacaacttttgaacgaaatggatatggttgcttcacaaattgctgaattaagagcagctgagaataaactaagcgaaaatatctaccaacatacgatggaacttagacacttcttttctgacttgggaataaacactgaacctagttcgaactggcattacgaacttagcatctacaaaaaaaacagtgaaaaaaggcaattagcaatggaacttatctccaaactagaaccattagcagagaagcaagaagcatatagagcaagattagaaaacttaaaattgcctatagattatacggacacggaagaaaaaattacttttcttcgtcaaggtttgctctattatcgaaaccacctaactgaaaatgcaaagctcgctgaaaaattagaacaagtaacgatgcaattagacttagttaaacaagatttattacttgtaaagaaagaaaaggcagacttgctagaacgtgcgaatgtgagtaacgaagaagactttcgtatggctgcaatgcgcgtaaaagaagaacagaagtggcgtgaacgattagttttaatagaagcgcaacttgaaccagaaaagcgagaagctctaaatagatatgaaaatcaagcaactatcaaagaaaaagagctccaattagaagaatcactgcggcaaatagaattagaacaagagcaacttcacgcctcactcgcagcacaaaaccatgcaatagacaaattggaagaaggcgggactttcgctgtattgatgcaagaattttattcagaaaaaagcaaattacaacaaatctcagctgagtggacagaaacaaaactagcgcttcaaatgttgcaaaacacgatgcagcagttacaagaaggaaaacttccaaaaacattaaaactggcaagtgaatattttaatcatttaactagtgggaactata

SEQ ID NO: 3707 - DNA, 3194 bp, Listeria monocytogenes 4b
  misc_feature (1)..(end): n can be any nucleotide: a,g,c or t/u
gagagaagcatggagtcctgcaatnggggggtatggggctaaattagtattatacttataattggcgtcgggcgcttgtctgacgctttttttgttgtctgaaaaattgtttcacgtgaaacaatttgccatgcttccttggataaatggaggataaaatgacaatagtagcaatgaatgatgtagttaaaagttttaccggagatattattttagagaaagtatcacttcaattagaagaaggtgagcgcgtcggtttaattggtcgtaatggcgaaggaaaaagtactattttgaagattttaaaaggaactgagggcgttgatagcgggattgtgacgagcaaaaagggcgcgaaaattgggcttttagagcaattatcgacggtggatcccaatataatagtagaacaatatttacgaactagttttggtgagttagaggagctggaaaaagaattacgagcattagaaggagaaatggcaacaaattccagcgaaaaattaatgaaccgctacggagataaaatggctttatttggcgagcttggcggctatgagatggatgccaatttgaataaagtggtgaatgggcttggtattggattgctactgtcgcaacgatggggagacttgagtggtggtgagaagacgaaggctgcattagcgcatttattattacagaaaacagatttattactcttagatgaaccgacgaaccatttggatttgatggcggtagaatggctgaccgcgtttttacaacattattcgggaaccgtattagttgtatctcatgatcgctactttttagatgaagtagtcgggaaaatggtggagcttgagaaccgcgaattaatcgtttatcatacgaatttttctggatatttgaaagaacgagaagaacggctattgcgggaattccaagattacaaagaccaacaaaagaaaatcaaaaagatgcagcaagccatcaaacgattgcgccagtgggcaatgcaagccaatccgccaaatgatgccatgttccgaagggcgaaaaacatggaacgcgcattagaacggatggaaaaagtaaagcgtccagtgttaacgcaaaaacaaatgcaattacaattcgatgaagctggtcgaagtggacaagaagttgtggttatggaaaacttaagcaagtcatttagcgaaaaagcaatcgtacaagatgtttctttgcaaattaggcaaggagaacgagtagcgattatcggtgaaaacggcgccggcaaatctactttgcttaaaataatggaagggaaagttgttcctgatgttggcatgattaaggttggtgcaagtgtgaaaatcgcgtcgctttctcagcaaatggaagagctgaatgaaaagctgactgtactggatgcatttcgggataaggttgctgtgacagaaggagaagcacgacaaatgctagcaggcttcatgttttatggagagatggttttccgaaaagtagggaacattagcggcggagaacgtatgcgacttaggttagcgcaatttattaatatgccagtgaatacgctgatacttgatgagccgactaaccatttagatatcgcctcgcgtgaaattttagaagaagcaattcgagcatttagcggcacaattatcactgtatcgcatgatcgctattttattgatcagctatgttctaaagtaatttggctggagaataaacaattaaccgtttatgaaggtaattacagttatgcaactagtaagcgaagataatcgacttgctggaaatcactttcaaaataaattagaatgaagaaaagaggtgatggtatggagataacagttgtaaaaggtgatattacggaacaagatgtagatgtcattgtaaatgctgctaaccccggacttttaggtggcggcggagtggatggcgctatccatcaagcggcgggtccggatttattaaaagaatgtcaagaggttattaatcgcattgggacttgtcctgcgggtgaggcggtcattacgtctgccggcgatttacaagcaagttacattattcatgctgtaggtccgatttggaaagacggagagcatcaagaagcgaataaactggcatcttgttattggaaagcgctagatttagcggctggaaaagaattaacttcgattgcatttcctaatatttctacgggtgtgtatggttttcctaaaaaactagcagctgaggtagcgctttataccgttcgcaaatgggcggaagaagagtatgacacaagtattgaagaaatacgctttgtttgtttcgatgaagaaaatttgaagttatacaacaaattaataaacagtgaagtcgtttaagataacaatcttaggcggctttttcaaatgtttcacgtgaaacattttttactatattttctgaataaaacaacaacggaaaaccttcttgacatagctccaagcttcttgtaacatcatattcaataactaaaaatatacattggctatttcagcatgattatagaagacaagtcgcatgatgtggatattttccaccattttttctttatgaaaataaggataagatgatgcgttttttctatataaaaaagcgagtaccaataaaaaaggagtgtttgcgacccatgtgggaaacaaaatttgcaaaagaaggcttaacatttgatgatgttttacttgttccagcgaaatcggacgtattaccaaatgatgtagatttaagtgtagaaatggctccatcactcaaattaaatgtaccaatttggagtgccggaatggacacaattacagaagctaaaatggcaattgcaattgcgcgccaaggcggaatcggtgttgttcataagaatatgagtattgaacaacaagcggaagaaatcgagaaggtgaaacgctctgaaagtggcgttattattgatccattttatctgactccagatcaccaagtttttgctgcagagcatttgatgggtaaatatcgtatctcaggtgttccaatcgtgaacaacgagaaagagcgcaaactagttgggattttaactaaccgcgatttacgttttatttccggctattcccagctaatgaaagaggnagnactttccagcacncggcggccnngttttancgaancagngcncgggncagatacaggaggtccnncnaacagngcaagcc

SEQ ID NO: 3708 - DNA, 2740 bp, Listeria monocytogenes 4b
  misc_feature (1)..(end): n can be any nucleotide: a,g,c or t/u
gggttctagtataataactgaaagtgcagtatacaacttaatgcaattccatgctcttcattgcattaaaatactgacttaaaaaattctcaaaagctgaataatcttctcttcttacaaaaagtttaggagaaatattatctgtaatttcttttggtagcttatttccaaaaggaaaacctatgatttctgtatcatttttactaatttctgttgaaatttcataataatgtaactcatattttaacccactatttacacaaattagaaaaggagtaatcaacaattctaaaactgtttgattttcttttgaaaataaaaccaaatttttaatgttttcttgtgatatataaatactgtcattttcactaaaattatttggtaagctttctatttttccaattatctcttgttcttccatcttattatttccctcattaattatagcgctaaaattttttcagctatttcatcttcgttatttttaaatattaaattttctccaaacgaatctatgaaaatttttcttatacctttagctaatacattcatatcaatgttatgattttcttgaacaatactaattattttgttgatttcttgactatattcatcttttggagctaagggaaacagctctattggatcccaatcatttattattttttctactttttcatacataatgacaccctactttccatacaatttttctattattttttccattccttcatcaaaatcttttttaccccaagcagtaactaatttgccatctttgctgacaattgcaacaccattttcagttataaaagcaaatttttctcccccattctgggataaagcttttccacgctccacaaaatcgtcaacttgactcttagaaagaccacgttgtttcaatctagacattccatgttcggagtgttcagaccaatttattttaatattaggatgattaactaatttacctattttcccaaagtccgttccaacttcaacgccattatttttctttcttctgtgtaaccaatctttagaaaccttgaacttcttccctttataacctccagcagtataacggaaaacaagaccacttataatactaaacccttgcgctttacttatctcttgcccagtaactgggtctcttccttttttcaccgattgaataactgcctgcaacaactcggcttcttcttgcgcttcattgctttcatgtggtaattccccgttaagcacagcggcattatacgcgttcgttgcttctacgtctactataccatttttcattaacacccacatttgaccacggtacgttttttgatattcgtcaaaattgaatgttgtttcgttattttttagcgcttttcctaaggcattttgcatccgggttacggtggtgaaattcaatttgctcatatcataggtgcccgttttactgttaaactgaatattcgactggagttcgcgaatggtttgctgaattccttggactaaatcggttaaattatcaaaaaaaccgccatgactttgttcaaaagccaagtatttttctaagatattttcttgtttgtaggcgatactcagctgggaacggtaactttgcatttgcccttctgttccagtattcattcgctgggctagtgcttcttttttcgcttcgatgcgatcaatcattttcccgagttcgtataagccgtccgcatcaattctcgcatcagcagaaccgtccacttgggcgtggaaatcagctatatattgcgataatcgttcttcgctttcgttcattgcttcgattatcgcatcacataatggaaaataggtcatttgatagtaatttttcgatgcatcaatcgcttttccttttaaactgccgtcttcggtatagtttttcacggcttttttgatgtctttaatgctttttcttccggcttcattagctgtatgtagttggtgcgcaaaggtttgtatttctccgatgtcaattcgactcactgtaacaactccttttgtaaatcttgttgttgattttctaattggtagatgtttttttggcaagcggtgattttttgttggtgttcttcttggttcgcttggatttttttatgccacttctgtttttcttcttcctgtagatctgccaaatagtagccgaaacttcttgattctgcgccttgccaaacttcgcgcagaagctccagcgactcccgttcttcttgatggacacgtgcaaaatcttctgctaaccactcttgttcattttgttgtcgttgtaaatcttgcaaaaaatcttcggccgcggattgttcttttttcagcagttgcagttgtgtctccatttgctggctctttgcatccatttatttacctcccaatcccatgcctcgttcaagctcttggtctttgcgagtaaatgatacgcctaattctttcaatcttttggcatccgttcctaccacaccttgaaaattgtccaccgcgtctaccaagtcaaacaatgctgttcgaaaatggttgatggaattggcttgactataggccatattgccacctttcatcggtaaatattcagttgatttacctttagattctaactttgtcgcgtgttttttcagatgttgcttctttaacttttatttcactcatttctgcgcctcatctctgtctataataatgaaaccttatcttttaattatagcaccgcacgcattctcgttttgtgagcgttttgtgaatt

SEQ ID NO: 3709 - DNA, 2668 bp, Listeria monocytogenes 4b
  misc_feature (1)..(end): n can be any nucleotide: a,g,c or t/u
tcgaaatgagtaaccttccacgaggcaatgaatgggaaatgaaaacagaagaaggtaacctactagaacaaatagcaaaagaaccaaaagtggatcctcgtcttgcgggattagccaattttttcgatgagaaaaaagaagactaaactccccgtgaagctggaatatattaaggaatttatttttcttagattaacgatacaagtacttagttatcgtcaaggaggtgtaaggaaatggcagtaccttttagaagaacttcaaaagccaaaaagcgtaagcgtcgtacacacgttaaacttcaacttccgggcatgaacgaatgctcgaattgcggcgaatacagactttcccatcacgtatgcccagaatgtggacaatatgatggcaaagatgtagcaaacagctaatattgctaaaaacaagtgacgtttcacttgttgaagacgaacctcgaaagacgccatgggtctttcgaggtttttgtttgcgcacaaaagtgcaaaagaatgctacttctgataaaataaaagcattaatcaatatggagctgaactaaatggcgaaccaactaaaagtaggaattattggagcaggagcgatggggcttttatacgcagcaaattttgccaatacatccgagctcactctttttacgcggagaaaagaacaaagcgatttattaaatcaaaaaggtctttctttaaaagataattccgaattaaaaaatatacatatacatgccacaataataacagatattaaaaagttatcagaacaacaattattaattatcgcagttaaacaatactcactaaaaagcattttgccactgctacagtcgatacctgaacgagtgccgttactattcatccaaaatggagcggcgcatttagatagcatgccgctactcggtaataaacgaactattttgctaggtattagcgaacacggggcggggcgggaagatgatacaacagtcatttggcgtggtcatggccgaacaaagtatagtatttatcaaggcgaactaagtgaggcggtaacaaaaacattagactcaaatccagattttccagttgaaaaacatgctagttacttagaaattataagtgaaaaattatttattaatgcagtaattaatccgctcacagctgttcttcaagtccaaaatggaaagctccttgaaaataaagaatggcacgagttattaaagacgattgtaaaagaaatacaaacggttttgccagtagaaaatgctttagaaaaagtggaagtaatctgccaagtgacagctactaatttttcttcgatggctcttgaccgaatgaataatcgaatgacagaaattgatggaatcgtgctgccaattttagaaaaaggggagtcacttcctacgcttcatgcgttatatcatctaattaaagggttggaaggagaaagcgatgtttgattggttaactaattcaacagcaataattattattttacctgttgtggtgtttattttgacgatgtttttttccagtttcaaactaaagaaaagtcagcggagaattatgttggccgctgacttatccactattttcttgattatagctgttcattttttcatgattgtgctatttaatcgctcgttcttattatatattttattgtttttatttattttaggtattgtaattgttgtcacggctgcaaagaaagaaggcgagattcagttccgcaaaatcctacgtggttactggcgcctatgcttcttcatttttgcgttattgtatgtggcgctttacctctatgggattgtctatagtctggttttaatgttttaagtgggcttgtttcaatccacactttgcttaaatcaaaataaccataaggattttctgcaattccttttatcattgaatgaagcgattgacttttttccggatgatgcaagtaaattaaataatgattttctgttaaccagctatcaatgctcgtttgtaaggcgtctcttttggaggcgtctttttctgttttaaatgcatcgagcttttccgtaagttctttgataattgcttgattgaaaagttgttgtggcaacagataggggttatttaaaaaatctaaataagccatttcgtcatctgaggctgggatttctcccatcatcatgaagtcggtttcttttgctggaacgttggaataggaagcttcctgatgcgtaatgatttttctttctaagttaattccgaattcgacagcttgctcttgaatccattttgactcttttacagcggtaggatgttgggtagttccaaaaataactttttcgccttggtagtttgctttttttaataaagtagcgattttctcaggatgttttttaggtggaagggatttttcaggataatagttagatgcgactgtcccatagttttcgaaatgttgttcacttgctttttgacaatcaatgagatggtagattgcctctcgaaatgccggatgttgtggggcgccatttcggtacgtattgaaacaaataaaattaacgccaacaccaggtttacgacgttctacataggcgggattttcctcgtaatcaacggaagtgaattgcattggaatggtttttaaattgtttccagtttgggcggtccaaaattctactcgatcaagaatc

SEQ ID NO: 3710 - DNA, 4018 bp, Listeria monocytogenes 4b
  misc_feature (1)..(end): n can be any nucleotide: a,g,c or t/u
cattactgacagacgagacaatccgctagtatagggtcatgggccgactagaagtcaagagcatttagctggtaaaagcgagttgttaaagcaagaagagcaactcggaacggcgcatgcagtactgcaagcaaaagcggaacttgcaggtaaagatggtgtgacgctcgttgtttgtggggacacgcctttaatcgaagctagtacgatggaagctttactgaaatatcaccatgaaaaacgcgcaaaagcaactattcttacaacggttattgaagatcctacaggttatggtcgtattattcgtgatgacctaggcattgtagaaaaaatcgtagaacataaagatgcaacagaaaaagaacaacgtatttcggaaattaacactgggacatattgctttgataataaagctctttttgaagcgttagagaatgtttctaacgataatgtgcaaggagaatattacttaccagatgttattaagattttaaaagattcggatgaagtcgttgcggcttacagaatggagtcttttgaagagtcacttggagtgaacgaccgaattgccctagctgaagcatccagattaatgcaacgtcgaattaacgaaaatcatatgcgtaatggagtaacgcttgttaatcctgaaaacacgtatattgatatagatgtaaaaattggtcaagatacagtaattgaaccaggagttatgcttcgtggggaaactgtaatcggtgatgattgcgtggttacaagcggctcggaaatcgtaaacagtgttatcggtgaacgagtacacgtcaaaacttcttctattttcgaaagtaaagttggcgatgacgttcaaattggcccatatgcgcacctaagaccagaatctgacattcacgatcatgtgaaaatcgggaactacgtcgaaacgaaaaaagcagtggttggtgaaggaactaaattaccacatttcatttacatgggagatgcggaaattggtaaaaacgtcaatgttggttgcggaagtattgctgttaattacgacggcaaaaacaaagcgaaaaccatcattggggataatgtctttgttggctgtaattcaaacctgattgcacctgtcaaagtgggagatcgagctttcatagctgctggttccacgattacaaaagatgttcctgacgacgcgctaggcattgctcgtgcgaaacaagacaataaacttggttatgcgaaacatttgaatcacggtaaataatttccatttgggaattttaaaattttaataaaaaatagtggaggctgattatgtcaaacgagtattttgatccaaagttgaagattttctcgctaaattctaatcgtgaactagctgaagagattgcgaaagaagttggtattgagttagggaaatcaagcgttactcattttagtgatggagaaatccaaattaacattgaagaaagtatccgtggttgtcatgtatatgttattcaatcaacgagtaatcctgtaaaccagaatttaatggaacttttgatcatgattgatgcgttgaaacgcgcttccgcagcaacaattaatattgttatgccttactatggttacgcacgtcaagaccgtaaagcaagaagtcgtgaaccaatcacagcgaaattagtagcaaacttaatcgaaactgctggtgcaactagaatgattacacttgatatgcatgcaccgcaaatccaaggtttctttgatattccaatcgatcacttgaatgcagttcgccttctaagtgactatttcagtgaacgtcatttaggtgatgatctagtagtagtttcccctgaccatggtggagttactcgagctcgtaaaatggctgaccgtttgaaagcgccgattgctattattgataagcgtcgtccgcgtccaaacgtagctgaagtaatgaacatcgttggtaatgtagaagggaaagtttgtatcattattgatgatattattgatacagctggaacaatcacacttgctgctaaagcattgcgtgaagcaggcgcaacaaaagtttacgcatgttgttcgcacccagttctttcaggtcctgctatgaaacgtattgaagaatcgccaatcgaaaaattagttgttacaaactccatcgctcttccagaagaaaaatggattgacaaaatggaacaattatctgttgcagctcttcttggcgaagcaatcgttcgcgttcatgaaaatgcttctgtaagttctttattcgaataaaatataaaacaggatgcctcattgagacatcctgttttttgatttaatttaattttccccaagtagcaggacatgctaaataaaaccattcatctaatttaggagcatatcttttgagataatcaagattttgtacataaaagcatgaatttttatacacgataactttctcttgctttaatttagaaataattctgctaacagctgagctatgtgcgataccgcttgaatagcctaactcctgcattgttaaattatccagtgtaatcttgatgccatcaggagtttctttaccatacacataggtcaggattaaaagttgaccgcaaatagagccgagcttcccgttaatcgaaaaatcattaaatttggctaggctgtatgaaacttgtttttgtagggtttggaaaacatagaaaaagtgcgtaagattcttgctcagtagttcttttagttcgtttattttgataacgtatgcggtagcctgttcgctaatgacttctaaattataatagccaaccgatgtttctgtatcgataaagccagacattataacgaaagcacctttatagtattgtaaattcatgatggtcccgttctcactaatacttgtaagctttgtaataccatcatataggaaaatacaatattcttgtggatcccattggttaaaaataagttcttttttatgaaattgttttggttttatcccgttagtttctaaatattttttgaattcttctgcttgagcgttcatgtctcatcccccaatcgttttttatcgcccttttttaaaataccctaaaaacattaggcagtaacaacaattgttagctgttgaaagaaagtcacgctaaataatattttttacatataggattttattatacaaattttgatttcgcaaaagaaatgcatacatatttaaaaacggatttatttagatgttaaaattgaaatagggttagtatatggttccgatggttgctcggagatatactaaccctttttttgtaggaataatatatgttagttgaatttattgttttttatgatgtttttgatagtttgtttttcggggaagtccatgattagaatgcctaatcctcgaactttttccgatgttaagttgagtacgaactgctctactttgttgtttaatgctgcagcatactgacgaggtgtgaatgttaatgaagtggcactaatatggttaagaaacagtttgttgtccgctttagaagcttgataagcagtctggacaatctctttgaattttgttttcacactcggaccattgtagtcatcttgaattacttggttggatgcgccgaactgcatgccgaatttgtgtgaattaatgactaatggcttttttgtgtggttctctgaaagtaataatatttttccgcggacatcttttaatgtagggattttattgctcgtgtcagttctgggagtagtgtaaaaataatctttgtaaatgttgattagtggttggatccgataatcaaaactatcgttgctgttttgctcgtcttttaaacgcataataatggtttcttttggatttttctttaaaaattgagtaatcgtttctaatacgcctgaaagtgatgcatttaaaaaaattggcccatggtaaattttgagattgtcttttgctctaatatcgatgtaccgtattcctgcttctagttgttggtacaatgacatcgtttgtgtttgagccagtggtttggttaatgtccacgtcatgtct

SEQ ID NO: 3711 - DNA, 4608 bp, Listeria monocytogenes 4b
  misc_feature (1)..(end): n can be any nucleotide: a,g,c or t/u
ctttgtttttgaacaacactagcaactatcttagatcggcggccgacgtgcgctggaagtcttcggtttcaatgctcttacagctatttgaccgttgcgaagatgccaccgagataagattttggcagatattgagcattatttgcaagaaaacttctcattagaacatagtacgattcaacttgaaggaaatcacgctcaccatcatcactgcaattaatgccgcttcatgatatgattaaagtatcaattagaggagttggtttagatggaagaacaagttgatttaggacattttttgaaaaaaacttttatcgctgtagttgccgtaaccttagtatttatcggggttctagcaatgttcacaatcatcggtgtaattatcgctataccgctactaaaaaaagctagcaaaatgcttctttccaaaaaagaagctagcgaccatactcattcacacggtggcaagttgaaaatcaaatgcccggcctgccatgcaaaaatgaaattcaaagatagcgaattgctcgacgaaaaataagttttaaagccttctcagtgagtttgagaaggcttttttatctaaatgtgcattattttaagaaattcgggaaaaggaaacgagaggtgttgtcaaatgaaagctgtaggattaacgagagcgtcaacggattttgtggatatagaaatcgacaagccagtaccagaaaaccatgatttactagttagaattaaagcgatttccatcaatccggtagatactaaacaacgtgaagcaacgaagctatctggagatgaagtacggattttaggttgggatgcggttggagaagtagtagatactgggagtgaagttgcattatttcaaaccgggcaagacgtttatttcgcaggtgacgtcacaaggcaaggagcgtacgcagaatacactttaattgatgagcggttagttggtttgaaaccacataacttgaacgtagaggaagctgctgcgatgccactgacaactattacagcttgggaagcattgtttgatcgtttaactattactgaaaatgataaaggtaaatcaattttaattattaatggcgctggtggtgttggttctattgcgacccaactagctgcacatgctggtcttgaagtcatcgccacggcctcacgcccagaaacagtagaatggactaagagccacggcgcgaactatgttatcaaccaccgagaaaacatcccagaacaactggaagaacttggatttgagcagggagttgattttattttatgtttgcataacacgagtgctcactgggatgagatgcaagaagcgattcgcccacaagggaaaatttgctctattgtagaacttgcagagccagtgaaaatgactcttttaaaagacaagagtgctactttcagctatgaattcatgtttactcgttcgaaatatgatacaacagataaaatcagacagcatgaaattttaacagaagcagctcatatgctagatgcgggcgaattaacaacgacattaaatcaagttttatcacccgtgaacgcggcgacaatagaagaagctcacaaaattatctcatccggaaaaatgattggaaaattagtagtgaaaggatttgagtaataatgagtgaaaaacaagttgcgctatatatcgcggttagtttggacggttatattgcagatgaaaacggaagtgtcgaatggttagaatctattgatagtgaaggggatgcgggttatgaagctttctttgacaacgtagatacagttgtaatgggccggacgacgtatcaacaaattttctcgcttactgacacgttcccttacagtaaaaaagatgtctacgttttttccaacacgaaagctgggacaaaagatgagtacgctgactttgtagctgggactgttgatacatggctgaataacattgatggtgaaaaaatctggcttgtaggtggcgcaaaattagtgcaacaatttttaaaagagaaggcgatagatcggtttgtgataacgattgcgcccattattttaggaaaaggaattccactctttgaagaagatagagagcacgcgctagagctagaagaagtaactcgtttcggccagtttgcccaactaacgtataaaaacttggaggaaaattaaatgaaaattgctgcttttgatattgatgcacaaaaaggttttacgccgctttgtcccgatgaattaccggtttcgggcggagacaaaattgtgccagaacttaattttatggcaagtcttgcttctcttcgaattggtagtaaggacgcccatccgcaaaatgccgtatgggtagtggattccaaagacgaaatgttggctgaactcgaatatccaaatgcagaccgtacttgggtaaggcactgtgaaccaggtacaaaaggttttgaattattagatggtttaccagttgtgactgattatgattactttatttggaaaggtatggagccggatattcatccgtacggcgcttgttaccacgatattgttgaacagctttcaacaggtgttctagaatatttacgggaacaaaaagtcgatttagttcttgttggaggtttagcttttgatttttgtgtgaaaactacggttatacagttaagtagggcaggcttttctgtattagtttatttaccagcgacacgtgcactatctgaacaaggttttgatgaaacgaaagagcaattagcaaataccgagaaagtgcaacttatcgaaacaagggaggaacttgtcgcctattgccagtaattatattggaagaggtgaggggaatgaggaaagttggtatatttcctagtatgataattcttttcacagtaggaatttctgctgtgttatatccgctactaccttctgaagtggcggtgcatttcggtacggacttctccccagatatgtntatgcaaaagtggcttggcttaattctgattccttttttaatgattatgtttacgggaacggaatattacggaaaagaaaaactgaatcaggcagctttgttggaatttgaatattgttttagactgttgttagtgctgttaacaatcattcaaatgagtattattgtatacgcgctaggttacgatatcccgactggtagattttctctagtcacagcaggagcattcatgttcgttgttgcggcctacattcaatactcgaaaaaactctttaaatttttaacgatgattggttttaaaaagatcgatgcatggtcaagaaacctacttagaaaaatcacaactgttacacttaatatagctggtacaatctgttttattcttgctttgtttatgcgcaatgatcccagttacttaatgctagcaatgttgatgacgatgtgtgttattgttgttgggtcaggagtttaccttaataagaaataaaaatataacagtttttatttacaattgatacagtttcggtttataatggtggcggaagttctgcgcgaatttggcaggaagtccgtcatttttttgcgtaatcaaaaagcgcttacaaaagaggaggagaaatattgcataaaacagccagaaaaatggtagtggcactcagtttattatgtttactagcacttacagcatgtcagtctggcaataaaggggaaaatgaaaaagtaacatccgacaagaaatccaaagtggttaacatcatggaaacgagtggaattccgaatgcaagtccaacactcgcagacaatagcgtaagtttccgagtaatcaatcaaatttttgaaggattatatcgattagataaaaacgggaaaccggcactcgctctagctgccagtgaacctgaagaaaaagatggcgggaaaacacttatttttaaaattcgcgaagatgctaattggtccaatggcgacccagtgacggcgcatgattttgaatacgcttggaaaaaagtggtggatccaaaaacagccgctgcatacggaccgcaaatggaggaaatcgtcaaaaatgctacccaaattttaaaaggtgaaatgtcaccggatgaacttggaatcaaagcgttagacgacaaaacactacaaatcgaactagaaaacccggtgccaatattcaaagaactcctaacgacgggcacgttcttcccacaaaaccaagcgtttgtagaaaaacaaggtgaccgttatgggactaaaagcgacacattgatttccaacggcccgtataaattagaaaattggaatggaacaaatatgacatgggattacgttaaaaatcctacttactgggataaaaagaacgttccaactaaaaaaatccatgtaactgttgtaaaagatactaatgcggctttaaacttatacaatacaaataaattggaccgcgtagagcttgatggtgaatttgttaaacaatacaaagatgataaaaacttccataaagaagcaactggacgctctgtttatatgaaaatgaaccaaggcaaagatggcgtgaaaacggatttagctaacttaaacttacgtgggggtttagcgatggctatcgataagactggcactgtcaatacactacttgcaaatggatctaaagcattaaacgg

SEQ ID NO: 3712 - DNA, 2981 bp, Listeria monocytogenes 4b
  misc_feature (1)..(end): n can be any nucleotide: a,g,c or t/u
aaagaactaaaacgacaatctgatgcattcggctcttttctactaaaaaccctgaatactgacaaagaaaaacctattatcgtttacggacatatgtctcccctaatgctagttgcatttttaggctctatcaaatcaggtcgagcttatgtaccagtagatgtttctatgccagttgaacgtatagaacaaattaaaaaagcagctgatccttctttgtttatttgtacagaagagctacctagtaaccttactattactggttgtccggtactaacacaagatcagctaatggacgccttagagaaacatttcggagaagttccagataaagaagcatgtgtaaaaaatgatgataactactatattatttacacatccggaagtacaggaaatcctaaaggggttcaaatcagtcaaaacaatctagtaagttttagtaactggatattacaagacttttctttaagccaaggattgcgtttcttaaaccaagcacccttttccttcgatctatccgttatggatttatatccaagtttactatcgggtggaacgcttgtacctcttgataaaacaattactgcgaatatgaaagatttatatcgtgaaatacctgctcaaaacttggatgtatgggtttctactccttcttttgctgatttgtgcttactagacgataactttaaccaagaaaataaccctggcttaattcatttcttattctgtggtgaagtacttgccaagaaaacagcaagcgaattgctgaaccgtttcccagatgcagttatttacaacacatacggacctacagaagcaaccgtggctgtcactcaagtaaaagtaactcgagaggttatcgatgcttatccaagcttaccacttggcgttattaaaccagatatgcgtttacacatcgttgaccaagaaactggtgaggttcttccagaaggcgaaaaaggagaaattgtcctgattggtgctagcgtttctaaaggttacttaaatgaacctgaaaaaacagaccaagtattcttcgactataaaggttatcaagcttatcgcacaggagactctggcattatcaaagacggttatctgttcttccaaggacgtcttgacttccaaattaaactgcatggttatcgcatcgaattagaagatatcgaaaacaacctaaaaaaagtaagttacattcaaaactgcgctattattcctaaaatgaaagatgaaaaggtagatatgttggtcgcacaggtcatccctactaaccatgatttcgaaaaagaataccagctaagtgcagcaataaaaaatgaactgaaagaatttatgccagcatacatgatcccaagaaaatggatttacaaaacggaattcccgttaactatgaatggcaaaatcgatcgcaaggcgcttaatagcgaggttaacaagtgagtttaccatacggcacaatcctttattttggagtacttgtactatttttgattcctatcatagtagctggtttgttaggaaaaagattaccgatttataatgcttttgtgacactcgtatttttatactttatgttctcagcaagtccagtccaaggagctacttttatcttctttgtcttctggcaacttgctcttgtacgactttacttccattacaggcaggagaaaaagcagaaccacggcggcgtattcgtcatagcagtgattctgtctattctcccccttattatctctaaagttgttccaattttaggagacaatgttacaatggttggtttcctagggatttcctacttaacatttaaagcggcacaaatgattattgaaatacgcgataacttaattaaacagtataacgcgtgggattttgttaatttcttactattcttcccgactatatcatccggaccgattgaccgattccgtcgctttaaaaaagacgtggataatccgcctagtaaagaagcttatctagctttattaaaccgaggaatattccttatcttccttggttttctctacaaattcattatcgcttacttagtaaacaaacattttgttgttccactagacatcgcgattacacaccatgtagacacaacaaagagtttaattggttatatgtatgcctatagtatgtatttattctttgactttgcaggttacagtgcctttgcagttggggttagttacttactcggcgttcaaacacctatgaactttaacaaacctttcgcagctcgcaatattaaagagttctggaatcgttggcatatgacgctttctttctggttccgcgattatgtattcatgcgtttcgtattttgggttacaaaaaagaaatggtttaaaagtaagttcactattgcctacctagcatatttcgttaactttttcatcatgggtgtatggcatggacttcattggtattacatcgtttatggcctttatcaagcaacactaattgttggatttgacctattcgaacgctttaacaagaagcacaaattctatccaaaaaacaaaattacttatgtaatcggcgttttcattacattccaatttgtttgtttcggattcctgatattctcaggtattttagataaaattaatttttaaaactaactaaaggtggtaatttataatggcttttcgtgaaaatgtattagaaatcttagaggaaattacagaaacggatgaagtagtacaaaatacaaatattaaattatttgatgaaggcttgcttgattctatggctacggttcaacttttaattgaaattgaagaaaaattagatatcactgtacctgtttccgaatttgaccgcgacgaatgggctactcctgaaatgattattacacaactcgaggcgctaaaataatgaaaaaaaagctgtggatgacatttgggcctttactggtcgcattcgcggttttccttttcgttctattcggacctagtagcttattctctaaagtt

SEQ ID NO: 3713 - DNA, 4964 bp, Listeria monocytogenes 4b
  misc_feature (1)..(end): n can be any nucleotide: a,g,c or t/u
aaatcacttggtttttcctacgactgggaccgtgaaatcaatacaacagatcctgaatattataaatggacacagtggatttttgaaaaactatatgaaaaaggtttagcttatgaagccgaaatcgctgtaaactggtgtccggcacttggtactgttttagccaatgaagaagttatcgatggcaaaagtgaacgcggtggcttcccagttttccgcaaaccaatgcgtcaatggatgcttaaaattaccgcgtacgcagatcgtttgctagatgatcttgatctagtggattggcctgaaaatattaaagatatgcaacgtaactggattggtcgttcagaaggcgcagaagttacttttaaaattaaagatagcgatgaaacgtttaatgtctttaccacacgtccagatacactttttggcgcaacatataccgtttttgcaccagaacacgaacttatcgaaaaaatcacaacaccagaacaaaaagaagcagttgaagcttataaaaaacaagtagaacttaaaagcgaactggaaagaaccgaccttgcaaaagataaaacaggtgtcttcacaggagcttatgcgattaatccaatcaacggcgaagaagtgccaatttggattgcggactacgtgttgattcaatatggaacaggtgcgattatggccgtaccagctcacgatgaacgtgactttgaatttgcgcaacaatttggtttgaatattcgtcctgttcttgaaggcggcgacgtgacaaaagaagcattcactggcgacggaccacatattaactccgatttcttgaacggactagctaaagccgaagcgattaccgctgcaattgattggctagaaaaagaaggcatcggtagccgtaaaatcacgtatcgtttgcgcgactggttgttcagcagacaacgttactggggtgaaccaattccagttattcactgggaagacggggaaacaacgcttgtaccagaagacgaactaccactacttctgccaaaagcaacagaaatcaaaccatcaggaacaggcgaatcaccacttgctaacttgcatgactgggtaaacgtaacagacaaaaacggtcgaaaaggtcgtcgcgaaacaaatacaatgccacaatgggctggctcaagctggtatttcttgcgttatatcgatccaaataacagcgaagcaattgctgacaaagaaaaactagcagaatggcttccagttgacgtttatatcggcggggcagagcatgcagtacttcaccttctttatgcacgtttctggcataaattcttgtacgatatcggtgtagttccaacaaaagaacctttccaaaaactatttaaccaaggtatgattcttggcgaaaataacgaaaaaatgtccaaatcaagaggtaatgttgttaaccctgatgaagtagtagaaaaatacggcgcagacacacttcgcttgtacgaaatgttcatgggaccactagaagcttcgattgcatggaacgaaaatggactggaaggtgcacgtaaattcctagaccgcatctggcgcttgctagtaactgaagaaggcacactcgctgaaaaagtgacaactgatgcgaatgctaacttagaaaaagcatatcatcatatggtgaaaacagttaccaaccattacgaaaacctgcgtttcaataccgggatttcgcaactgatgattttcatcaatgaagcatataaacaagatacgattccaaaacaatatgtcgaaggtttcgttcaactcttgtcaccaatcgcaccacaccttgcagaagaattatgggaaatcctaggtcacaccgaaacaatcagctacgtagcttggccaacatacgacgaaacaaaactagtagaagatgaagtagaaatcgtacttcaagtaaacggcaaagtaaaaagcaaaatcaccgttgccaaatctctcgaaaaagaagaactagaaaaaattgcacaagaagacaacaaaatgaaagaaaacctagaaggcaaaacaatccgtaaagtgattgtcgttccagggaaacttgtaaatattgttgcgaactaataatggaaactgctggcttctggctggcagttttatttttgactaattttttggtataattacggaaaatggaatggagaaaagttaatgagtcatggtggtgttatcaatcgaataaaggtatttaaatgattgccgaagtcagagaaaaaagggggcaagcagtatagcgaatccagaattgcaactatgcacgtagtacagatcagttgagatatatagtaaagcagatgcaagcggtgcggccgttatccgtttctgtaaatcaatcggacttcaaagttttccagaactaaaaagacaattatcattagatttggctcaaccgcaaaagaaaggctattatgatattgaaccaaatgaagattttcataccatcacagaaaaactagtttccaacatgattcaaacgatgaacgatacggctagccaactagatgaagccaaagttttagaggcatgcgaattactcggcgaagcagatactatttatacatacggggtcggggcttcttggttagtagcagaagatatttcacaaaagtggctgcgtgcagggaaacatgttttagctacgcaagatgcacatgttctagcaatggcttttgcaacggggaagaagaaagccgtttttattgctatttctaacagtggagaaacatcagaagtcttgcaactcgttgatcaagccaaactgaacaacgtcattgttattagtcttacacgttttggtagcaataagctgaaggaaaaagcagatttatctttagaaacttctcgtgctccggaagctgaaattagaagtacagcaacaagttcaagacaagcacaattgctagtaattgacattttattttactattatgcatcccatcactacgacgaaatgattcaacaaattaaacattctcgagaggccacgaatcgttttagagaataaaagaagataggtagtagcttgataattaaagctactgcctatttttttactagcaattataaataaaaattttaatattaaaattatatattgaaattttatttcatttatattatactgtgttggaaggagtggttaaaatgttagagaatttagcaacagaagaacgaaatgaaaaaacgattgacttagacacactttctccaaaagaaattttagcagtaatgaatgaagaagatttaacagttccaatagctataaaaaaggtcttacctcaaatcgagttaattgtaagcggtgtcatctcgtgctttcaaaaaggtggccgtttgatttatcttggtgccggaacaagtggaagattaggagtacttgatgcagctgaatgtgttccaactttcggggtctcaaaggagcaggtcattggcttaatcgcaggtggtgaaaaagcttttgtagctgcaatagaaggtgcggaagattcaaaaatacttggcgaaaatgacttaaagcaaattaagttaactgcaaacgattttgttattggtattgctgcaagtggtagaacgccttatgtaattggcgcacttgattacgccaaatctgtcggggctaaaaccggagcaatttcttgtaatgctaatgcaaaaatttcagcgcacgccgatatagccgtagaagttgtgactggagcggaaattttaacaggttctactaggttaaaagcaggaacagctcagaaactagtattaaatatgatttcaacagcttcaatggttggaattggaaaagtgtataaaaatttgatggtggacgttttaccaacaaataaaaaattagaagagcgctctaaacgaattattatggaagctacagaggctgattacgaaacagcaaataaattttatgaagcagctgaaaaacatgtcaaagttgccattgtcatgatcttaaccaattcaaccaaagaaatagcgttagaaaaattaagtgaagcaaaagggtttgttcgaaacaccattcaaaaataaggagctggaataatgacaaaagaagcagaaattggaaaacaaatatttattcatgtcggtggaatggaaaacgtttcaagaattgcacattgtatgacacgagttcgattggggatagttgatagtgaccttgttgatgtagctggattaaaaaaagttccgggtgttatcggtgttgtagaagatgatactttacagattattgttggaccaggagttgtgaacaaagtggccggcgcaatggcagaaatggctggtgttaaaattggcgaaacgattcaagaaaatttggatagcggcacaaaaactggtaaggaattagtcgaagaaaaagcatccaaaacaaaagctgaattaaaagcaaaacaaaataattcatctggttttaaaagattactaaaatcaatctctaatatttttgttccactaattccgggttttgttggagcgggattaattgctggtattgcagcaattatttctaataatataacagctggaaatttagatgctgctgtttggactcaatatattgatattttaggagttattaataaaggaatatttgccttcttagctatttatgtagggattaataccgcgaatgaatttggtggaacacctgtactcggtggtggaatcgctgggataacattgctttccggattagcagaaggacatacaattacaaacattttcacgggggatcctatcgtagccggacagggtggcattatcggcgtattattagcagtttggttaatgtgcgtacttgaaaaaaacttgcgcaaaatcattccgaatgcgatagatattatttttacgccaacgcttgtattacttattattggtttagtaactattttcttaattatgccttttgcaggacttgtatcagatggtttagttaacgg

SEQ ID NO: 3714 - DNA, 3407 bp, Listeria monocytogenes 4b
  misc_feature (1)..(end): n can be any nucleotide: a,g,c or t/u
tactgagagtattcttccactgatttgtcgttttgtacttcaaatagggattcatcttcttcaatcttatcgcctggttgtacaaaccatttaacgatttcaccttcatggataccttcaccgatatccggtaatttaaatgaatatgccattttattaagcctcctgtaatttctaaggttcagataaactgaaccttagtataaaaatatttctttccccttctaaaactccccataagttttaaaacggtcattataaattaaaatgcaataacttcttttacacgttcgatgatatcgttgtggttaggtaaccaaactgtttctgcttgagagaacgggaatacgctatctggagcagcaacacgcataactggagcttcaagagaaaggattgcatggtcgttgatttcagcaacgatattagctgcaatacccgcttgtttttgcgcttcttgaactacaactgcgcggtttgttttcttaacggaagcaatgattgtttccacatcaattgggctaattgtacgtaaatcaataacttctacagatacgccatctttttcaagcgcttctgctgctttcattgattcttgtaccattgcaccgtaagtgatgatagaaacatccgtaccttcacgacgaacagctgctttaccaatttctactgtgtattcgccttctggaacttcttcacggaaagaacggtataatttcatatgttctaagaagataactggatcgttatcacgaatagctgagattaaaagaccttttgcatcatatggagtggatggaattaccacttttaaaccaggtgattgagccattaatccttctaagttatccgcatgcatttctggtgtatgaactccaccaccaaaaggtgcgcgaattgtaattggagcagtacgagttccgcctgtacgataacgcatacgagccatttgaccagcaacggagtccattacttcaaatacgaaaccgaagaattgaatttctggaactggacggaaaccttcaagtgcaagaccaatcgcaagaccaccgataccagattctgctagaggagtatcgaatacacgatcttcgccaaatttttcttgtaatccttctgttgcacggaatacgccgccgtttttaccaacgtcttccccaaaaactaatacgttttcgtctttttcaagttctactgcaagcgcatctgtaatcgcttgaatcattgttttttgcgccatgattatttcgactccttcgcttcatagattgccagttgctctttgataggagcagttggtgtttcgtacatatttttaagaagatcagttacagtttgttttggtgtagcatctgcttctttaattgctactttgatttcttcttttgcttgatcgataacagcattttctttttcttcgttccaaaggcctttaccttctaagaaagtacggaagcgaacgattgggtctttaagttcccattctccgtcaagttcttttgtacggtaacgagttggatcatcaccagaaagtgtatgtggaccataacggtaagtcattgtttcgattaatgttgggccttcaccagcaactgcacgttcacgagcgaatttagttacagcatatactgcaagtggatccattccgtctacttgtacgcctgggattccggctgcaactgctttttgagctaatgtttcagcagctgattgtttttcacgaggtgtagaaatcgcgaatttgttattttgtactacgaagattgctggagcatggtaagcacctgcaaagttcattccttcatagaagtcaccttgggaagaaccaccatcacctgtataagtgattacaacagcatcttttttacgttttttaagtcctagagcaacaccggcagcttgcacgatttgtgcaccgatgatgatttgtggtgataatacatttaaatcttcagggaattggttacctacaaagtgtccacgagagaacaagaacgcttttgtaagtggaagtccgtgccagataagttgtggcacatcacggtaacccggaagaatatagtcatgtttttcaagtgcgtagtggcttgcaagttgggaagcttcttgtccagcagttggagcgtagaaacctagacgtccttgacggttaagtgagatagaacgttggtcaagtacacgagtccaaaccatgcgagtcattaattctactaactcgtcatcagttaaatccggcattaaatctggattaacgatttctcctttttcattcaaaatttgaactaattcaaattgtttatgaacagcctcaaattgtttctttacgtcgataatagccttctttgttttagaagccatttcgtatccaccctttcgtcattcacattgtacagtttcaaattcttcattagttaggtatgcgttttatgtaacgctcgtccggtcatttacccatctaaatggattcttttaaaactgccatcctgattgtgtattaattataatagcgtagtaaaaagaaaagtcattctatagaaagaagcagattccggaagcttttttctaaattcctattaaccaattacgtagcctctccagttattaccacaaaatcctcattgaaaacatgggttttaagagagtttgtgaaaaaatattcattctttcacaatgtttcataaaaaatcaggaactttccttttagttaaaagttatttctgttttacttaaaaacaagaattttattaatacactaatcttctctcttaatttacactaccaagattatgaagtcaataagttaatctctaattgttttatcgcttacaatggcattattacttaaatcattcgctttccacttctgtattaaaaaaagatgaaacagataaaaactgttatataatattgcaactctcgcattaccacacctatttcaagctttcaaacagcaaatatcgatagtttgtgaattcacaaacatatattttttttctttggttagtttaaacgaacattataaaaaaaataattggtattggtcgcttttaaaacttttttttttttaacaaatatgcctttagacctattaaaacactctttttttcgagtctagtaatctttcattccttttttttcgttcttttgttaaaataaagataagttattaaagaacaggagagaatcaaatcatgcttacaatggacgatattgtacgagaaggtcatccagcacttcgagaagttgcgacagaagtgactttcccgctttcagatgaagaaaaaaaattaggacgcgagatgctcgaattcctgattaacagtcaagatgaagagttagcagaaaaatatgggtttgcgtggtggcgttggatttgcagctccacaactcgctgggactaaacgttt

SEQ ID NO: 3715 - DNA, 3539 bp, Listeria monocytogenes 4b
  misc_feature (1)..(end): n can be any nucleotide: a,g,c or t/u
actgcaggacggaccgagcttgctccctagtcacggccgacagtgtgctcggaaagacaattcattgtagtcaatcaggaaagatgtcgtaattgattgccccttcttcatccgccgaaaaacagcttctaaaatgtaaggcactatttgcattctattgtcaataaaatgcaaattcagatgatgctcaacttgctccaatttttcccgaagctctttaattctcgcttcgtccacttgcatgaaatcctgtaaatactcttcgccgccaaaactttctatgatgtgttctgccgcataaatgagtgccgtccgctgattccactcgtctccgtcaattaaatagccacgcatccgcgaatatttaacttcaaggttgaatttttcaagtgtcttttgtaccagcttcaagtctctcgtaatacggtgttcttgctcacctacagctcgcttataaagtgattaagggataactcttcacttcctgttgttaacatgaggatgattagactagcgcgttccttttctgacgggatgtaccaatctgttttttcgccatcttcctcaccaatgatttgaaacaggtcaggttctacgataaatcgaccatttgcagcacgatgaatcttcgggtaagtctgttcttctagccaattattaattttttggaaactatagtcgacttgtcttcgagttaaaccgaattttgcttgtaagttcgtactcgatgtgtcaggatgtcgtaagagttcttttaaaagtgaattacttctctcatccaaatacatgtcgttccctcctgttcgttttaattataaatctaaatctaataaaaatgtacacgctttcatcccaataacttgcggaaagaatgtacatcattgggctttacttgtgacttttttaacaatcctattatttgcaaatatgtgaaagttgcttgtaaagcttgatatatagcgagattatgaaacttcttgaaggtaggtaaaatctactttgaaacaaaaatgagaatgaagtaacggagctttgcggggcgatgtttcttcttaatcatacaaaagatgtgcggttctttctacacgttttgtaaaaaataacgcaaaaaaaggcgcaaatgataaaaaataccattcgcgccataatcagtttctctattttcttttttgtttatcgactctgagtatacttttgttgaaattcttaaatggcgccgcgcgtttcactttcattttcgggaacgattttaacattcgtcgttcattaaatttaagtttgcgcatgctggcagcaagttctttgtcttgcttacgttttgcttctatttcagcaattttcatatcaacattttcttgtttcttcaaaagtccttcttcaaattctttcgcccgttcttttacgcttgcttttagttcatttgcttgggcagttagtttttcattaaattcggcaagtgctttttggaatgatagcatacttgtgacagatttaatcgtatcaataagcatcagaaccacgatgagtgcaggaataatccagccaccccagcttaaaatccaatccgcaaattcggtgacaagtgggtgcaagaagcgtacaacgataatacaagcaaatccccaaaaaatcgaaatcggcaagcaaattcgtccttttacattgagcggccagttgtgataatcccaccatgttgtatggaataatgcttctaaaatcgttgcggtaacatattcaatcaccgtacaaataatcatcgaaaaaataaataaggcccataagttattttgaaacggtaaaatcatcattaaaactgtcgttaccccaaacccgtaaatgggacaatatggtccataaagaaaaccacgatacactaacttcttctctgaaatcgagcaaaaaatttcctcccaagcccatccaagaacagaataaatgaagaagtataggataaacatattaatatccatcttttcatctcctttttgttttctttttcacaatcaatttcattataacagaaataagaacttcttaactaaattagtcaaaaagttccgcttgtttatattttggcaacttattcttcgcttctgagtacgcatgctgaattaatgcgcgaatcaagtctttatctcgttcttcttccaataaaacagaaatccaaactcgtttattcatgtaataaccgggaacgatggctcgattttctgcgcgaagttgctcacttttttcggcatcgcacttcaaggttaaaatcggctgcccttctttattcgttccgcgcattgccattagctgatccaaaacgtgatagcgctccgctccccattcttctttaaacgaatactggactcctttaagaccactaatttccttctgtatccaagcaaattcatcgctcattgtgcgggctccaaaatcataatcttattgccatctgggtcaagtaaattcagttcacgtccgccccactcagccacacgaggttctggtgtctccactcccgctgtttgaagttcccggtacatctcatccaaattagtatcacacgagaaaacaaactccactttagattcgcttgcttcgccccatttgctattattccaaacaataatcccgggagccttttcagaaaaacctaatttcgctccgtcataattgtcgtacccttcgaatactatcggaattcccaatttttcgtgataaaacgcaaccaacgccgccggatcttgcgtggaaatatttgtacaaacaaattcattaatcattttaagcacctccatatcgttagtttaacaaagcatttacgtttttcattgtatatttgcgacattttgcagaaaaatttgcttcatttcttctggggtgtgattactatatcgtttaaattgtttaattaagtgagcctggtccgtaaaaccatgaagataagcaagctcagcgcccggcacacttggattctcatataatgcctgtaatactttttggaaacgaataagttttgctgtctgttttggtgcaagtcccatgtgtttttgaaatagccgttctaactgccgaacagatacagctcctaacgcaagttgattgggattttgtagtaacttatcaataccgtttaaaaaatcaggatggacttgcttgccaagcatcattaattttcgcagtaaaaattcttctaataaagctattctttccatgttcgtcgtcatttcagcaaacctctcttgaaaaaacgaaacaaatccagcaaacatctcttccggctcttttacccgattcatgctaccagtcaagtcctgttcgacaaataaaaataacgaccacgcataaaatcgcacggcaaaaagctcggtattactttcatcgtcagactcaaacggtgcatcactaacgccaacaaatatagcatccgtcactagccctgttttactatcaattgtaaaaataatatccgcacataaatcaggaaccactaaattatttcccgggaaattcttatcatctgcctcccaaaaacagcaaatatagcctgt

SEQ ID NO: 3716 - DNA, 3914 bp, Listeria monocytogenes 4b
  misc_feature (1)..(end): n can be any nucleotide: a,g,c or t/u
aggaggaaaaagcaaaatgagagtagcagtatctggatttaaaggaagaatgggacacgaggttgtcaaaactgttttaagagaagcagatttagagttagtagccgtacttgaccatgaaccaaaagaaaaaaatataaatgaaatagtggaatttagctcgttagatgtacctgtttttggtaatttaagcgagatgttagaagaaataaaaccggattgtgtcgttgattttacgacccctaaagtagggtatagtaacacgaaaacgattttagaacacggcgtacgtgcggtcgttggtacaacaggttttacaccagaacaaattagtgaactaagatcaattgcagaatcgaaaaaaatcggtgcgttaattgcgccaaactttgctgtaggcgctgttttaatgatgcaatttgcacaaaaagcagctaagtatttcccgaacgtcgaaattattgagttgcaccatgacaataaattagacgcgccaagtggtacggctgttaaaactgcggaaatgatgacagaaacgcgtgaattcgttaaacaaggtgctgcagatgaagtagaacttattgaaggagctagaggcgcagaatatgaaggtatgcgaattcatagtgtgcgtttaccaggacttgtagcacatcaagaagtgatttttggagcagagggacaaggattaacaattcgccatgactcttatgaccgaatttcctttatgtctggcgtggcactttctgtacgtaaaacaaaagaacttgaaacacttatttatggcttagaaaatattttagactaaggataggtgaatgagatgcatatcgcattaatcgcgcacgatgaaaagaaagatttgatggttggatttgcaactgcatataaacatttgctcgaaccgcatcaattatatgcaaccgggacgacaggtttacgcattatcgaagcaactggcttaacggtacatcgttttaaatcaggcccgcttggtggcgatcaacaaattggtgcgcggatttcagaaaataaaatggacttagttattttcttgcgggatccactcactgcgcagcctcacgaaccagatgtgacggcgcttattcgattatgcgatgtatacgaaattcctttagcgacaaatattggcacagcagaaattttaattcgtggtttaggagctggtttcctagattggcgagacttaagacggaatgatgaataaaggagcgatgacagatgaatgacgttttcctaaaagcgcttcctgtattgcaaaaattaactacagcgggttttgaagcgtattttgttggcggatctgtcagagattacttgctaaatagaacgatttccgatgtggatattgcaactagtgctttcccagaagaagtaaaagagatttttcagacaagttatgacactgggattgcacatgggactgttacagttagagaaaataatgaattttatgaagtgaccacttttcgaacggaagggacgtatgaagatttcaggcgcccaagcgaggtaacctttattcgctccctagaagaggatttaaaacgtcgcgattttacgatgaacgccattgcgatggatgaacattttgcgctacaagacccgttttctgggcaactagcgattcaaaataaagaaatcaaagcagttggtaaagcctccgaacgttttcatgaagatgcgcttagaatgatgcgagcagtccgctttctgagtcaacttgactttgagcttgataaagaaaccgaaaaagctttagaaagccaaatagagttgttacagcatacttccgttgaacgaattacggttgaatggctaaaaatgatgaaaggcaaagcagcaaaacgtgcgatagaactacttttaaaagtcaaaatggaaacttatttaccaggcttaaaagacgagaaatcagcactaagcgagtttgctagttgggactgggaaaaacgaacaaccgaagaatcgatttggcttggactcgtcgttgctgtcaaacctaacaatgttaacgcatttcttaaagcttggaaattacccaataaaacaattcaacttgtgaataaagcatatcaatacgcgctaaacatgaaagagacatggctaacagaagaactttatcatgctggcaaggcagttttctcattagtaaatgaactaaatgttattcgagggcaagaaaacaaccaacataaagtaagtcaagcatacgaggcgttaccaattcactccaaaaaagacttagctattactggagctgatttattaaaatggtctggagaaagcgcaggtccatgggtaaaagagacgcttgataaagtggaatgtggtgtcctttccaatgaaataaacaatgaaaaaattcagattaaaaggtggctaggctatcatgaagaataatcgagaaaaattacttgctttatttacagaaagtgatggtacttatttatcagggcaagaaattgcggatagtctaggatgctcgcgcacagccgtttggaagcaaatggaagctctccgtaaagaaggatttgaaatcgaagcagtcagaaaccgtggttaccgtttgtcagcaacagcagaacagtacacgaaagatgcactactactcggtttagaaaccaaatttatcggtcagcatttggaaatccatgaatcggttagctctacacaaatcatcgcccatcagcaaatcggattctagccctgaaggaaccgttatcgtagccgatgagcaaacagctggaaaaggtcgcttgcttcgcccttggagttccaaaaaaggggaaggtatttggatgagtgtaattttaaaaccacaaatccctattcaaaaagtaccccagttcacgtttatcgcctcactcgcaatcacagaagcgattgaaaatagcacaaagctcgaaccgaaaatcaaatggccgaatgatatttacattggtaaacgaaaaatctgtggtgttttaacggaaatgcaagcggaggcagaaacgattcacgcagtaattatcggtatgggaatcaatgtaaatcaacaggaattcccagaagaaattaaagacaaagcaagttctctaaaactggaattaggcgaaagcgtctcaagaaaagctttactacaagaaattctcacttctttagaaaaatattatgagctttttctagataaaggattcgcaccgataaaattactttgggaaacaaaagccattccatttggcgaaaaattaactgctagcacaacaaaaggcaaaattcatggacaagtaaaagggatttctgatgaaggtgtactcttactccaagacgcactcggtgaagtacattcaatctattccgcagatattttgctagataatgaaaaataacgaaacactatagaaaagaacgttttaaccctaataaaatacccgaaaacatatcttttaactcgaaaacatagtgtgaaaatcactttttcgggtttttcttttttgggaaaaatcaagtacaataaatgcgaaggagctgtttagatgaaaaaaatactattactattaacatcaattaccgtaatccttacacttggagcatgcggcgataataaaaaagaaacggaagagaaagcaaatcaaacagaaaaagaaagcgcctcttttctaacaaccatttccaccaaagattttaagcaaaaaatggccgataaaacaactggctttgtttacgttgggcgtccgacctgtgaagattgccaagcatttcaacctattttaaagaaagaacttaaaaaaagacaaccagaccaaaaaatggcttattataacacagataaagcctccgaaaagagtcgcgatgatatgattgctcttttagaaaaaatggacatcgattctgtcccaacgatggtttat

SEQ ID NO: 3717 - DNA, 3154 bp, Listeria monocytogenes 4b
  misc_feature (1)..(end): n can be any nucleotide: a,g,c or t/u
cgtcttgtcgttcggaagatcatataatgggcagggcgtgtatagaatcacctggccaattaaggcgcggaatgcacttattatccaacaaggtgtggaagagagtgggtgctaccattcgagttcaaacgccagttccaattgatctctctacattgaatgatggcaattataccttgtcagtatcagcggctgacagaattggtcatacatcagaagcctcagaaaaagcgttcacagtagacagacaagcgccagttgtgacagctgacgacaagatcacgtatgaaataaacaccaagaaaacagaagagcaatttttaaacgatgtaaatgtaaaaacggaagccggagcggtgattaaaaccaattttgatacgatggtgagaatggattcgccaggcgattatacggttttagtggaagctaccgatgcagcgggcaaccaatctgatcccatttatgtcattgtaacagtagaagatacggtagcaccgattataagtgcagacgaagcgattagttataaccagggaaatacacgaacagaagcacaatttctggctgatattcatgcaacaacagatgaaccagcaacgattacaagtgattttgcagatcaagtgaaatttgatacaccaggagtctacgcagtcacattaaaggcaaacgatattagcggaaaccaagcaataccaagaacagtaaatgtcacagttaaagatgtcattgctccagtaattacagcagatgaagcgattatttacgaaaaaggcataaccaaatctgctactgatttcttaacagatgtgcatgctgctacaaacgatggctcggcaatcacctctaattttgcaacggtagtagatttaaatacaccgggggattacgatgtcacacttaactcgacagatgcaggtggcaataaatctgacccaatcaccgtaacagttaccgtacgtgatacaacaccaccagttattacagcagatacaactatcacttacgaaaaaggaaccacgaaaactgcagctgcctttttaacggatgtaaatgcaacaacgaatgacggctcagcagtaacttctaacttcaacccaaatagtttgaagcaagtagggacttatcaagtgacgttaagcgctattgatgaaaatgggaactatgctttgccagtcaaggtaactgttattgtgcaagatacgcaaaaacctgtaatatcatctagtgccacaagcattacgtatgaacgcggcgaaaagaaacaagaaacaggattcttcctagatttagctattaaaacggatgacggcacaccagttacaagtgattttgatacagcggtaaatctggatacagcgggaagttatactgtgacgctaaacgcagaagacgaaaatggcaataaagcagatccagtcactattaccgtcattgtcgctgatacagaaaaaccaattatcacagcagatacaacgataacctacgcaaaaggaacaaccaaaactgctgctcaatttttaacagatatccacgcaacgacgaatgatggatcaaccatcacgagcaattttgacccaactgtccttacgcaagaaggaacttacaaagtcgtattaaatgcaaaagatgatagcaacaacgaagcagatccagtaactgttactatcaccgtggtagatacaaaaggaccgattatcaatgcattaaatacaatcacctatgaaagaactatcaataaaaacgaagcggattttttagcagatattgaagcaactacagatgatggctctacaataacaacggattttaatagtaaagatcttgatacggttggtacctacacagtcacattaaatgcagaggatgcaagtggcaataaagcaacgcccgtaaaagtgacaatgaaagtagaagataacattcctcccatcatcacagctgaccaatcaatcacttacgaaagaggcattacaaaaacagagcaagcattctacaccgatattaatgccgcaacaagtgacaacagcgcaatcagctctgatttttcgaaaatcgatttaacaaaaacaggaaattatgaagtcttactccaagcaacggatcaaagtggaaacaaagcattgccacttaaaattaatgtgctagttcaagatactatcgctccggttataaaaacaaccagccgagaaataacaaacgagcgtggtgtaccaatgaccgaacaacaactacttgcaagaattggcgccaatacagatgacggttccaaaataaccaccgattataaccctgcaattgttaacacatcaggggattatctagttcatctgtatgctgttgatgccgcagggaaccaagccacacctgtagaaattactattcatgtaaaggatactaccgcgccaatcattacggcagataagaaaattagttatcctgttggaacagataaaacggtaacggaatttttacaagacattcatgctacaacggacgatggttctaaaatcacgacagatttcgatccaaatatgttgaaaacaaaaggaacatatactatccacttaaatgcagtagatgcagacgggaataaagctaagacaatcgatgtaagcctcacagtagaagagaaagtgacgccgccgacaccaccgacaccaccgacaccaccgacaccagatgatggtggaaataatacgaataacggcagcaatgggacaaatgatagaaacgccaatataacggtaaatcctaccaagcaaaatactaccgctacaaatgaaagcatcccagcattaggtgatgcaacatcaactattccagttatcgtaggtatgttccttttagccacttcacttgttcttattagacgcaaataaaaaaagctagcgacaaacatgtcgctagctttttaggctgttttagcttttttcttttgtttaggtttttttgactttctggaaataaaacgaacgaggctaataataagagatacaacatattcaccgaatgaaccgatgaatatggcaatagctatttctgtttgggacatcccgccgccgtaaaaactaatgaaaaataccacaccacttgcaattagtcccatagttgctaggaaatatttaaaccaatataaacgaaaaacaaaatc

SEQ ID NO: 3718 - DNA, 2977 bp, Listeria monocytogenes 4b
  misc_feature (1)..(end): n can be any nucleotide: a,g,c or t/u
aaaatattttcaaactcggggacgtgccagcgaaagaagtaatgataccgcgaatgtcaatgattgcgattgaccaaacggcgaccgtaagagatttactgaaattaacttctgaacatacatatcatatttttccagttacggaagatgaagataaagatcatattatcggaatgctacgagtcagtgcggttatggctggacttggaaaagatgaaacgattgtgacgcaatctattcaaccatttattacacctgttttagaagtgtttgaaggcatgattttggaagagttacttgtgaaaatgcagcaagaaagtgagccgtttgtcgttctcacggatgaatacggcgggacttcggggattgtgacgctagaagatgtcatggaagtaattgttggtgatatggaagaagcaaaaggtccgaaagggattcgaaaagtagctttgaatcattatattattgaaggatctgagccgcttcttgaagtcgaggaagcactgggggtcccaattgaagggccgggtgttcatacgttatcgggatggatgttactcgaacgttttgacttagaagctggtgatgagattgaacatgagggataccgctttatcgttcgttcaatgaataaaaactcgattcggcaagtagaagtaaaattagggaaagaaaaaccagtaaaattggaggaataagcctcttgttttactggtttttgtttaattaacgatgtcgtcgtgataactatgcgcaagccgacttgcagcggccgcagcgatagcgccaacaatatcatcgagaaatgtgtgaacggcgataccatcgtgttcatttaattttgcaagaatacctggttttactttatcgatataaccgtaattggtaaatccaatagatccgtacacattgacgatggagagcgcaagtatctcgtcgacgccgtacagcccctcatcagcgctaatgatattttgtagtggttggacgagttctcctttttcagccatcacatcaagctgtatgcctgttaaaactgcattttgaacttcacgcttgcgaagaacatgctccacattttgacggcaaatatctaattccaatccagggtgatatttttgctgtaaaaataatacaagttctgcgatatcatcaatttctacgccccgttcgatgagccaactgcgtgcttttgattctaaggcactttgtttttctaccattttttcttacctccttctaactgtatgtatattgtatgatagacgtttacaggatttctaaacctttttatacaaaaatagcgaccgattgtttggtcgctaaaatatttgtttaaaaaacctgaacaacttctttaaagccgataattttttctgctaaagttaattcgatacccatttttaaagtcatatcagaactggggcaagtctcgcatgcaccaagtagtttaatttttacgacaccgtcttgtgtgacttcgataagttcatagtccccgccatcacgaactaaaaacggacggaacttttttaaagctttatcaacttcggcgtagctaatttcttccataggatatagttctcctttcgtgaggcattgttatattttctattataacaggatatggggaaatttaaagaaattaaattgggtttcctgaggttggaagtagtgcaatatgaagtaattaccaaacaaaaactctcttatccaattgataagagagttttagctatttattttagctgtttttcttagagatagagtaaattcctaagagaacgaaacatgtaccaattaatccaaacaatatactatcttgttgattatcaccagttttcggtaattttgtttgttttttgattctagttactttgcttgctgttggtttgttttcgctgattttaataggtgttttgtttttatcctcttttttaggattgtcttcttgtttagcatatacaaaggtgactgtttgagcatcagttgtaaatacgccattagcgttggctggtgtggctgttagcttccaaccactcaagtttttagctgttgccgcgtaagatgtatctagcttaccgttcaatgtatctggagtagctaattcgttgccatccacgtcgacatatttcacggtaacaggagcgccgtccgctttttcgtacacataagtgaccgtttggttagcgtttgtgaatacgcccgttgcattggcaggagtcgttttgactgcccaaccagtgatgcttttggctgtagattgataaggagcatcaattttgccgttcagtgtgtcggaagtagctaattcgttgccatccgcgtcgacatatttcacggtaacaggagcgccatccgctttttcatacacataagtgaccgtttggttagcgtttgtgaatacgcccgttgcattggcaggagtcgttttgaccgtccaaccagtgatgcttttggctgtagattgataaggagcatcaattttgccgttcagtgtgtcggaagtagctaattcgttgccatccacgtcgacatatttcacggtaacaggagcgccgtctgctttttcgtaaacgtaagtgactgttgcatcactatcgccaaattgtcctgaaggctggccttcaatttcttttaatgtgtagttagtaattgttttttctattgtttgataattttctccggatttaccagaaattgtttcacttggagctaattcatcgccattttcatctttgtaaaatacgtttactgttgaatcggattgtgcagatacattaattggttgcgatactttaatagaataactaagtggtactcctttagtggaggtagctgtgaatgttgctttataagtaacagtcttatttccaactggtaagttagtaaaagaaacggttttattatcggtagatactgttccgccatcagaaatgctagaaacacgcattttttcgccatcaatatctaaagt

SEQ ID NO: 3719 - DNA, 3475 bp, Listeria monocytogenes 4b
  misc_feature (1)..(end): n can be any nucleotide: a,g,c or t/u
cactgcatgggcaccagtgtgctggaaagacacatctctttcaaatgttacaatacgttaggactataaaaatctatcatggacaggagtgatggcggatggcaaaacgagattactatgaagtgcttggtgtttccaaaagcgcctcagcggacgaaataaaaaaagcttaccggaaactgtccaaacagtatcatccggacataaataaagaagcaggcgctgatgaaaaatttaaagaaatatcagaggcatatgaagcattaagtgacccacaaaaacgtgcgcaatatgatcaatatggacacgtagatccaaaccaaggcttcggcggcggtgctggtggcggatttagcggtggaggattctctggatttgaagatatctttgacacattctttggtggcggtggacgtcaacaagatccaaatgccccaagacaaggtagcgatttacaatatactatgcgtcttaaattcaaagaagctatttttggtaaagatgcagaaatcgaaattcctcgcgaggaaaactgtgacacatgtcatggttccggtgcaaaaccagggacaacacctgaaaaatgtagccattgtggtggtaaaggttccattaacgtggaacaaaataccccatttggtcgtgtagttaacaagcggacatgtcaatactgtaatggtactggtaaagaaatcaaagaaaaatgcccaacttgtcacggtaaaggccgtgtaactaaaacgaaaaaaatcaaagtgaaagttccagctggcgtgaacgacgggcaacaaatgcgcgtatctggtgaaggagaagccggcattaacggcggacctaacggcgatttatatgtggtatttgtcgtaattccagatgagtttttcgaacgcgaagcagatgatatttacgtagaagtcccaatcacattcgtacaagctacattaggtgacgaaattgatgttccaactgttcacggcaaagttcgtttgaaaattccaagtggtactcaaacaggaacaactttccgcttacgtggtaaaggtgtgccacatcttcgaggaaatggaactggcgatcaacatgtaatcgtcaaagtcattgttccgaaaaaactagatgataaacaaaaagaaatcttgcgagaatttgcttccactactggagacaaagtagacgaacaaacatccggattttttgacaaaatgaaacgagcttttaaaggcgattgatgaacgtagaggtcgatagttgtgcgagaagcaaccatcgaccttttctacatacaaaaggagtgttaaaaatggaatggtcagaagtagaagtccatacaacaaacgaagctgtagaaccagtagctaatgttttgacagaatttggtgcagcaggagtatccattgaagatgttgctgattttttacgtgaacgagaagacaaatttggagaaatatatgcactaagacgagaagattatccagaagacggcgttattattaaagcttacttcttaaagacaacagaatttgtagagcaaattccagaaattgaacaaacattgaagaatctgtctacttttgatattccgctaggtaatttccaatttgtcgttaatgatgtggacgacgaggagtgggctaccgcatggaagaagtattatcatccagttcaaatcactgacaggatcacgattgtaccaagttgggaatcatacaccccatctgctaacgaaataatcattgagctagatccaggaatggcttttgggacaggaacacatccgacaactcagctatgtatccgcgcactgagcgattatttacaaccaggagatgaagtgattgatgttgggactggttctggcgtcttaagtattgccagtgctaaattaggtgcaaaatctattttagcaacagacctcgacgaaatcgccactcgtgcagcagaagaaaatattactttaaatagaactgaacacattattactgtcaaacaaaataatctacttcaagatattaatanaacagacgtggatattgttgttgcgaacattttagcagaagttattttgcttttccctgaggatgtttatagagcactcaaaccaggcggaattttcattgcttccgggattattgaagacaaagcgaaagtagtcgaagaagcacttaaaaaggctgggcttgttattgaaaaaatggagcaacaaggggactgggttgcgattatttccaaacgaggagtggaataaatgcaacgttattttgtaacaaatgagctagagaatgataacgaaacactatccattactggagaaaacttccatcatattactcgtgttatgcgaatgaaagaatccgaccaagttttcattgtttttcctagcaaaaaaacatgtattgccgctattacagctataaacgatgatgaagtatttttaaatttagtgaaatggctagaagaagataccgaattgcctatagaaatcaccatcgcaagtggtctaccaaaaggcgacaaactagaactcatcattcaaaaaagtacagaactaggcgcacacaaatttatcccttataaagcagaacgatctgtggtgaaatgggatgacaagaaagtcatcaaaaaaatcgagcgacttcaaaaaattgcgcaagaagctgctgaacaatcgcaccggacaatcaatccagaagttcattatgctgctagtttcaaagagttaatgtttgaccatgttcactatgactttgttatcgcagcatatgaagagagcgccagagaaggtgaggacagcgcgcttgctaacttattccaaaccatgaagcctggacagtctgttttatgtgttcctgggcctgaaggacgcattaccgaaaaagagctaatgcaccctccagaagctaatgcaccaactcgcacgactcggtccgagaatgtcaggaacaaactccggcccattctatcgcggatacgcttttcctccctgttccccacccccctaccctccacactcacaacttttcttttcttaccatctctatccgcccctcggtcacatacccgtgaccgtttccctgtgtgaacccccgtttcccttccctgttttatgtctatagattctctcaacccgcaccacaacatccacacacacttaccaacccccccccccacttccctcccaccccccgccgctaccgccctcgcccacgtgttccataccttttctacgcctcccttccacttccattctaatacgagtatgccccctcgacgtcatattccctccacttttgtattattatttctaaccggcggtggatgaagccaacttttacccgttcattctccatcgttcgcgttatttgatatcccactatttcccccccatttggcgctgacgcacacatattgtcgcccactttttccgccatgactctcgcgacgcgttcgccagctctcctcaccacccccatattat

SEQ ID NO: 3720 - DNA, 3768 bp, Listeria monocytogenes 4b
  misc_feature (1)..(end): n can be any nucleotide: a,g,c or t/u
gaattaaaaggtgatgtagacgttcatgcaagtggtgtagatgtagatgatttgcttatttcgcttgcactagtaggagcggatttacagcgacaaaaaatgacattgctgcatcaagatgggctggctaatttattagttgatcccgtagatgtcgtaattagtgatttacctgttgggtattatccggatgacgaaaatgcaaaaacatttgaactttgccgtgaagaagggcattcatttgctcatttcttgtttatagaacaaggaatgcgctacacaaagccaggaggatatttattcttcttggtacctgacgcaatgtttgggactagtgactttgctaaggtggacaagtttatcaagaaaaacggtcatattgagggaattattaaattgcctgaaacactgtttaagtctgaacaagcacgaaaaagcatcttgattttacaaaaagcggacgtagatgtaaagccgccaaaagaagttttattggccaatctctcttcgctaacagatccgagcgtaactgcaccgattttagctgaaatagagaactggttcaaaaggaaacgataatggaaggaattgacaaaaacaaaatggaaaaaacgattgcaattaacgccgggagttcttcactgaaattccaattatatgatatgccatctgaacgtgttatcacagcagggattgtagaaagaattggtttgaaagattctatttttacaattactgtagacggagaaaaaatcaaagaaattattgatattcctgaccatgaaattgctgttcaaatgctacttgaaaaattaattaaccacaaagttatcggttcttacgatgaaatcactggaattggtcaccgcgttgttcacggtggagaaagattccctgaatccgtttatattgatgaccaagtaattaaagatattgaagctctatctgaacttgcgccgcttcataacccagcgaacgttactggtattaaagcattccgcaagattttaccagatgttgtttcagtggctgttttcgatacagctttccatcaaacaatgcctccagcaagttatctatacagtctgccatacagctactatgaagactatggtatccgtaaatacggtttccacggtacaagtcacaaatatgtatccgaacgcgctgcagaacttttaggacgtcctgtagaagaattacgtttactaacttgtcaccttggtaatggtgctagtatcgctgcaatcgaaggcggaaaatcaatggatacttccatgggattcacaccactagctggtgtttctatgggaactcgttctggtaacattgaccctgcgcttattcctttcatcatggaaaaaactggcaaaactgcagaacaagtacttgatgtgttaaacaaagaatctggtatgcttggcgtatctggtatttcaagcgatcttcgtgatttagaagatgaagcagcaaaaggaaacgaccgcgcagaacttgcacttcaagttttcgttgaccgtatccataaatacattggttcttatgcagctcgtatgaacggtgtagatgccattatcttcacagctggaatcggtgaaaatagttcatacatccgtgaaaaagtacttcgtggacttgaattcatgggcgtatactgggatccagcacttaaccaagtgcgcggagaagaaagattccttaactatccgcactccccggtaaaagttatcatcattcctacaaacgaagaattaatgattgctcgtgatgtagaaacaattaaaaacaatcactaaaaaagaaaaaaaggctagctcttaattaagagctagcctttttttctatccttatttttcttctttataatcaggaacatcattacgtactacaagaacatcacaaggggagtggcgaataatatactcagatacactaccaattaacaaacgttctacagcgttaagtccagttgcaccacacatgattaaatctgcttggaatgcttttgctgcttcttttgtaatagctgtttttggagaaccatactcaatgtagctttctacttttgttacaccggcttttaaagcatcttctttatagccactaagtaattcatctgcatattcggtagctttgtctgccatgcttgtatcgtaattggctacagatgaaaacgcgcgtgtatcgataacatgtaccagaccaagcgccgcgtcattacggttagccacttgaattgctttttggaatgctctttctgcttctttggatccatcaactgctactaaaactctttcgtattgttgtaacataataattcctccaatcaaaatatgtattttctatacttatattttaccctctttttcctaaaagaaccataaaatgaaaaataaattatagtgaaacaaatatttcgtctaattttactaaaacttttgtttgaatttcagttagttaattttttacaacttaggtatattgtgttagcatgggggtgtagaaaatcttttatagtctattatacctatatcaaggagagtgatttagatgttagtcggcgtaccaaaagaaattaaaaataacgagaatagggtggcaatgactccggcaagtgttttttcatacgtaaatgcaggtcatactgtatacgtggaaaaagatgcgggcattggctctaattatcaagacgctgattttgtgcaagcgggggcaaaaattgttgaaacagctaaagaagcttgggatgtagatatggttgtaaaagtaaaagaaccgattgcatcagagtatacatactttaaagaaggactattacttttcacatatttacatttggcaaatgaaccaacgcttgcgaaagctttgatggagagtaaagtaaatagtgtggcgtatgaaacagtagaacttgcagaccatacgttgccattactttcgccaatgagtgaagttgctgggcgaatggcagctcagattggcgcacaatttttacaaagaacgaatggtggtatgggtgtcttgcttggtggggtgccgggtgtagagaaaagtgaagtggttattattggtggcggaatcgctggaacaaatgcagcgaaaattgcagctggtttaggtgccaacgtgaccattcttgatatgaatttgaaacgattgcgcgaactggacgatatttttggcaatcaagtccaaacgttaatgtcgaatgattttaatattgaaacagctgtgaaaaaagctgatttggttattggagcagtattaattccaggagcaaaagcgcccaaactcgtcaaagagcatgtaattaaacaaatgattccgggatctgtccttgtagatatcgcgattgaccaaggagggatttttgaaacaacagatcacgtttccacacacgataatccaacctacgaaaaatatggtgtacttcattatgctgttgcaaatatgccaggtgcagtaccgcggacgtccactttggcgcttactaatgccactttaccatttggattgaaactggctaatcaaggtttagaagcagccgtgcaaaatgacccattcttacttcgtggattaaatacataccaaggtcacattacgtacaaggctgttgcagattcacttgatttaccctatacggatagcaaagaattaatttaataaaaaaagcgaactttctcaaaggaaagttcgcttttcttgttagtcctttccagcacagttcggcgctcagcatgaatagtcctgcatcnnncaaaggtagtc

SEQ ID NO: 3721 - DNA, 2293 bp, Listeria monocytogenes 4b
  misc_feature (1)..(end): n can be any nucleotide: a,g,c or t/u
aagaaagaccaagaagtaaaagtcacagtaacagcactacctgacaaaacttatacaggaaaagtgaaagaaatcgcagaacaaggtcaagtacaaaatggtgtgtctagcttctctgtaatcatttctcttgataaaacagacgatttaaaagcgggtatgactgctgatgcttccattttagtaaatgagaaaaaagatgcgctatacgttccaattgaagctgttcaaaaagacagtgacgacaaatattacgtattagttccagaagaaaaagacaatgggaaaacgaaaaaagtgaagaaatttgtagaaactggtcttcataatgaagataatatcgaaatcactaaaggtgttaaaaaaggcgaaaaagtaattcttcctacacaagaaacttctacggttcctggtgctcctagctaagttttttgtaagtacaaatcagacaaattgtatgaaggagggataaacatgccaaaaccgctaattgacatgaaaaatttaacaaaaacgtatacgctaggcggagaaacttttaaagcattagacgatgttacttttaccgttgagcaaggcgagtttttatccatcgttggtccgtccggttccggtaaatccactttaatgaatatgattggttgtttggatgttccggatgaaggcagctatcaccttgatgatgtagatgtttttaaactgagcgataataaactatccgaaatcagaaataaaaaaattggctttatttttcagcagtttaatttgcttccaaaattatctgcctttgaaaatgtggaactaccactaatttatgcaggactaagtgtttctgcacgagaaaaagccgcaatcgaatgtttagaaaaagtaggcttacttgaaaaacgtagaaacttaccaacgcaactttctggtggccaacagcaacgtgtggctatcgcaagagcactcgccggcaaaccgcaaattttgctagcagatgagccaactggtgcgctcgattcgaaaacaggtaaagaagtaatgggaatcctacaagaattgaatcgtgctggaaacaccatcgttatgattacgcatgatccaacaatcgcctcatacggtacaagaagtatccgtattcaagatggtaaattattccatgaggaggcgacgcaagcatgaatgttctccaaagcatgaaaatggcatggaaacaattaaaggcaagtaaattaaggtcttttctaaccatgctaggtattattattggtgtcgcatccgttattcttttagtatctctagggaatggtgtaacgcaagaagttgatgaccaaatgggcgatttgggttcgaatttaattacagtagttaatagctctgttaatccaaacgacaaatatacgtatgatgaagtaatgaaatatcaaaacattgatggagtcaaaagcgtttctccagaattatctggacaagtcaatgcaacttttgattataagaattcaagtaataaggtgataggcacgaatgaccaatataaggccgcgcgtagcctagaaatgaaagaagggcgtttcctactaccgattgataccgaatatggccagaaagtagctgtaataggctctacggtagcaagtgatctatttggttttggggatccgattggcgaaaccattagattaaacggaatgccttacaaagttgttggtgtcttgaaagaaaaaggcgcgtctatgatgggatcgagcgatgaccaaatctttattccgatttcttccgctcaaaggctcctaaaagatacaaatgtccgtacaatctatgtagaaacaaaatctgccgaagatgttgattttgtagtaaacacactagaatcacgtcttgcgattaaatttggtgacgaaaaagaacaagaaaaaaatgcgtcatccgcacaaatgggaccatcttatcaagtcattaatcaacaagagattctcaatgctttcaacacgattagtacaacgctaactactgcgcttggtgcgattgctgctatttcacttgttgttggtggtattggaattatgaatattatgctagtttctgttagtgagcgaacgagagagattggtataagaaaagcgctcggagctaaaaaacgagccatcctgttacaattcctaattgaatccattgttattagtgtctgtggtgggattatcggtattattatcggggtctcaggagcgctcatatttggctcagtcgcaggtatatcgtcaggaataactgcaggaaccattatcttctccttcgtattctcactatg

SEQ ID NO: 3722 - DNA, 4224 bp, Listeria monocytogenes 4b
  misc_feature (1)..(end): n can be any nucleotide: a,g,c or t/u
gctgagcggccgacctgtgctggaaagaacttgcaacacatgctagctaaaatcgaaaactgctatttttctgcagatcaacttttgagtctcataaaagtaaacacaaaagctaataacgagctatcgaaagaaataatagcagcaatccgctatttagaacagaatctctctgctgctcagacgaacgattatgtagtttgtcacggagatgttaaccataataattggattatttctgaagaaaacgaactgtttctagttgattgggatggtgcgatgcttgcagaccctgcgaatgatatcggaatgattttataccaatatattccgcgaaaagattgggtaagttggctctctaattacggcaccacattaaccgaagaattacatcgcaaattaaaatggtatacaatttgtcaaacggttatgcaactcataaccgagcattcgaatgaagccaatgaacgagcaaaacaaatttttcaaaatgcaatagaagatgatgaggtgtaaagaaagatgcgtgtaaaacataaaccatgggcaaaagatagattggaagaattcccagcaatttacatcaaaaacccagaagatttcaaaggtcagtggcgtgaagtattcggaaatgataatccagtccatatcgaaattggttccggtaaaggtcaatttattagtggcatggcaaaagcaaatccggaaattaactatattggtatcgaaatgatcgaaagcgtgctcgtttcggcgctcgataaagcgattgaagcagacgtttctaatttacgattagttgctagagatgctaaattactagaagaatgttttgaaaaaggagaaatagcacaaatttatttaaacttctccgatccatggccgaaaaaacgccatacaaaacgtagactaacgaatccaacgttcttaactatttatgagcgactgctaccggaagcgggggagattcatttcaaaaccgataatcgcagtttgttcgaatattcgctagtagctttctcagaatacaatatgttattaacttttgtatctcttgacctgcataatagcgattacgaagggaatattaaaactgaatacgaagaaaaattttcagctaaaggattccccatctatcgtcttgaagcaaaatttgatagaaattaacaaggataaccagatgcatctgctgcatctggtttttatttttaattggaggcgttaaaagtggattccattcaaattggaaaaataaagatttattggttacgcggagggtatactcattttgacggtggcgcaatgtttggcgttgtaccaaaacctttatgggagaaaaaatatcccgcaaatgacaaaaatcaattagctaacgtaaccgatccgatgttttttcagtacttagggaaaaattatttaattgatagcgggctagggaacagacggcttacagaaaaacaaaaacggaattacggtgtgacggaagaatcgtttgtactggaagatttggcgcaattatctatcgctccagaagacattgattttgttttgatgacgcatttgcacttcgatcatgtgttaggcctgaccggtgtttcggaagaggggagtttttattccatctttcccaatgcggaaatctggacttccaaaacggaatgggaggaaatgaaacacccaaacattcgttcaaaagcaacatactggcaagaaaactggcaaacgatagcaggacaaattcatacatttaccaaagaaaaagaattcaacgatgcgattaaaatgacgcacacaggtggacatagtaatgggcattcagttgtatggatagaatcggacggagaaaaagcgatacatatggcggatattttcccgacatttgcgcatcaaaatgtgctttgggtcactgcttatgatgattatccaatgacttctatctctgccaaacaagaaatttttaaacaaacttttggtgaaaattattggtttttatcataccatgacgccagatttcgagcagttcaaatggacggaaatggaaaaatagaagccgaattaaaaatagaacagcgaaattaagaagtgagaagtcacttcttttttttgagggtatttttattttgtgttataattgtatttataaacgctttaaaatagccaatatgatatcctgggtagggggttgtcgtgtggtatactataagggggtatatatggaaatcgagcaaaagaaagcgctggtaacgcgattcgctaagatagaaggacatgtacgttctataaaaacgatgacagaagaagagcgtgatttagaaactattatgcaacaaatagcagcggtgaaaaaagcgatggatgctgccgcaaaattaatctacacagaacaaatgaaggagttaattgaacaaggtgaaacagatgaagtggtaattaaaaagaaaatagatagttttatccgctaaaaaacgactccccacttggggaatcgtttttattttttaagctaaatatacgtcgatgattgttcctgtgttagcgtctgcgataaattcgaattgcttcttctcgccttcgcgaatacaagtgattccgccgtggtaaacgaaagtatcaatcgcgaattttttgtaatgttgttttttaagttgaatccaagaaccttcgattggtccttcttgcttgaatgcatcttttaccttttctaagatgacgtccccagaaattgttttatcgctaagtaaataatgataaacaaggtgtccagccgctgctcctgctccaacgcctgcaatgaaagctttccagttcatcgcttttcctccctagtgtttcctattctttttaaaagatgctactacaaacatctcttttaatcattatactacaaatttttgattataaaaggatttttgaacacgctttctgtaaaagagagaagtgaagcgagcggaaacggatattatttgctataataaaagagattttagacggaaagagatgattattaatggaaaaagaaacgttagcgatgtttaaagaattaacggaacttcaagggacttcgggtgatgaacatagaattcgtgcttttatgcgaaaagaacttgaaccggtttccgatgaaattatccaagacggcttaggtggtatttttggtgtgcgccacggagcggaaggtggtccacgcgtcctcgttgcggctcatatggatgaagttggctttatggtaacgcaaattacagaaaatggtctaatacgttttcaaacaattggtggttggaatccgcaagttttacaggcacagcgagtgcaaattatggcgcctaacggtccggttattggggtagttgcttctgttccaccgcatttgttgtcggaggctgaacgtagcaaaccaacggatcctaaaaacttactaattgatattggtgcggatgataaagcggacgcggagaaaattggtatcaaaccagggcaattcattgttcctgtggctgaattcacgccgcttgcgaatccaaagaaaattttagcgaaagcatgggataatcgttatggcgttggtcttgcgattgaacttatgaaagaattgaaaggcgaatcgttgccaaatacactttttgctggggcgaatgtgcaagaagaagtcggtctgcgcggtgcgggcgtaagtgcgaacatgattaaaccagatttattcttcgcgttagatgctagccctgcaaatgatacgactgggaataaatcgcaattcggtcaaattggtcaaggtttcttactgcgtatttttgaccggacgatgattatgcatcgaggtatgcgtgaatttttattagatactgcggaaaccaataaaattccttatcaatattttgtttcgccaggaggaacggatgctgggaaagtgcatacatcgcttagcgggattccgagtgcagtaattggtgttccagctagatacattcactcgtctaactcgattttacatgtggatgactatgctgctgcaaaagaaatgattacaacgcttattcgcagtttggataaaacgacctacgaaacaattaaaaacaatgcgtgaaataataaagaaaccagtaattgttgtggggttgttccttttggtggcgagtttagtattcttgctaggctatgttacggacctgccttattttcgtgattcagagcttggttggatatggaccactatgatagtgggatcgt

SEQ ID NO: 3723 - DNA, 2600 bp, Listeria monocytogenes 4b
  misc_feature (1)..(end): n can be any nucleotide: a,g,c or t/u
ctattaagtgtagcccattttcacgataaacagcaagtatattgcttacaaaaaattagccgctaatgtttgagcagatattttgtgcttttggaaaggaagcgtataatagttgatatatcatttgacgtatcaactatgggggtgaaaacgctgaaaccatgtacagaacgatctgaattactttaccggatgcacttattatccaaggaaattagccatgtatttgaacaacaaacgaatatgagttttacgaaagtagagattctatttcatattcaacaaacaccaggtcaaagtcaaaatcgactacgagagaagctttatattgattcggcaagtattacccgtcatttgaagcgaatggaagcgcaagggctgattgttcggaaaaagcaagatgaaaacaaacgctatacgtatttatttttaacatcagcgggtgaggcggaattagccactttacttttggaaaaagaaaaatttcagaacggggcgctagaagccttttcagaagaagaagttagtgcgttacttaaatcagtcacaaaaatgatgaataatgtagagaaaatggaggagaagtaaaaatgaaagcagttgtaattgaaaattatggtggcaaagaagaattaaaagaaaaagaagtagctatgccaaaagcgggtaaaaatcaagtgattgtcaaagaagcagcgacatcaattaacccaattgattggaaacttcgtgaaggatacttaaaacaaatgatggactgggaattcccgattattttaggatgggatgtagcgggtgttatttccgaagttggagaaggcgtaacagattggaaagtcggcgatgaagtattcgcacgccctgagacaacgcgttttggtacgtatgctgaatatacagcggtagatgatcacttgcttgcaccacttccagaaggaattagttttgacgaagcagcatcgattccacttgcaggcttaactgcttggcaagcattgttcgatcacgcgaaattacaaaaaggtgaaaaagtcttgattcatgctggtgctggtggtgttgggacgttggcgattcagcttgccaaacatgcaggagcagaagtaatcacaacagctagtgcgaaaaaccatgaattactaaaatctcttggcgcagaccaagtcattgattataaagaagttaattttaaagatgttctttctgatattgatgtggtgttcgatacaatgggtggtcaaatcgaaacagatagttatgacgtattaaaagaaggcacagggcgtttagttagtatcgtcggtatttcaaatgaagaacgtgcgaaagaaaaaaatgtaacagcaactggaatttggttgcaaccaaacggcgaacagctgaaagaacttggcaaattgcttgctaataaaacggttaaaccaatcgtcggcgcaactttcccattctctgaaaaaggtgtttttgatgcacatgcattaagcgaaacgcaccacgcggttggaaaaatagtcatttcatttaataaataagattttcggaaagctagatgctatcatctagctttttttgttgtttgctggaataagttagatgggctataatagcaaaaaaggtggtgtctagatggaaataagagaattgaagaatgggcaaataataatgattcgggaagctacaaaagaggactctagtaatattattacttatttaaatgaagtagctggtgagacagattatttatcatttggtcaaggtgagtttgcgtttagtatagcggaagaagctgaatacatagaagaaaatgataagaacccaggctctgttatgttgttatgttttattgatgatgaacttgcgagtatttctcaacttatggggcatatgaaaaagcgagaattacatacttctgaactagctatttcgatacggaagaaatattggggtctgggtattggcacaatttgcatgggtgaattaataaaatacgctaaaagtagcgagtatttaaagcttatctatttagaagctgtatcagagaataaacgcgcaattaatttgtacaaaaaatttggatttatcgaagctggtgaaattccagcgttaatgcaagtggacagccgttatttagatgtaaccatgatgtatttggttatttagtcttcaataagaaagactagatcattaactacttctatatcactaagttgcttcgcgataatatcggctccagtgttaagaaaaatagcaatttgactaagaatacgaaggctaatgtcagaagtacgaatatctttgtcaataattttctgtaaagagccttcttttaagcgagtattggattcaacatcagtggtagtagtgttattatttgctaacaattgttcaatcggatgcatcatttcacctcgtttcaatagttaactttatgaattaattataactaaatttgcttcttggataaactataaagccttgaaaattaaacaaaaaagggagaagcaaatgaatgatttaaaagacatttttaaagtattgtatcagtttaagacagattatctcaaagtaaccttattattaacaatcttacaggcatttgt

SEQ ID NO: 3724 - DNA, 2567 bp, Listeria monocytogenes 4b
  misc_feature (1)..(end): n can be any nucleotide: a,g,c or t/u
tttactatctagacattagtaggaggtttctgttaaactatgataggttataataatactgtggggaattttggactcattttatttttgtgaataaacttacaaggagttgaggaagcatatgcctgaaaagaatatcgttttaattggggcaggatatgcaggtgtacacgctgctaagaaattagctaagaaatacaagaaagacaaagacgttaatattacattaatcgatcgtcattcgtaccatacaatgatgactgaactacatgaggttgctggtggtcgtgttgaaccaactgcaattcaatatgatttacgtcgtttgtttaatagaacaaaagttaatcttgtaactgataacgtgacacatgtagatcatgataaaaaagttgtaacaacagagcacggtagttatccgtttgattacctagtacttggtatgggcggagaacctaatgatttcggaactcctggtgttggcgaaaatggctttacactttggtcttgggaagattctgttaagttacgcaatcatattgaagaaactgtaacgaaagcatctcgcgaacaagacgttgaaaaacgtaaagcaatgttaacattcgttgtttgtggatctggatttactggtatcgaaatggttggggaacttttagaatggaaagatcgtcttgctaaagataacaaaattgacgcatctgaaattaaactagttgtagtagaagctgctccaacaatcctaaacatgcttgaaagaagagacgctgacaaagctgaacgttacatggttaaaaaaggtattgaaatcatgaaaaacgctgctatcgttgaagttaaacctgaaagcatcgtacttaaatctggcgaagagcttccaacaagtacattaatttggactgctggtgttcgcgctaactctgatacaaaagattacggtatggaatctgctcgtgcaggccgtttgaaagtaaaccaatatatggaagcagaaggtcttaaagacgtttatgtcgttggtgaccttgcttactttgaagatgaagaaggtaaaccaactccgcaaatcgttgaaggtgctgaacaaactgcattaactgcagcgaaaagcattatcgtggaaatgagcggtactggcgagaaagaaccattccaaggtaaatatcatggtgtaatggtttctatcggagctaaatacggtgttgctcaccttggtggtatgcacttatctggttggttcgctattttaatgaaacatatggttaacttgtattacttcttcggtattcgcagtggttattacatgtggcaatatattatgcatgaattcttccacattaaagatcaccgcaacattttccgtggttggacttctcgttatggtaacgtactttgggttcttcctttacgtgtatatcttggttggttctggattgacgaagctctttctaaaatctacggtgaaactacatgggataaagtaagtattacaaatttaaaacctttatttaacggtatcggttctgattcttggttaactgcaactacctctaaaatgccattcgaatggttacaaactgctgctacatctggtgctagtcaagctgccggtgatgctgctggggctgctgcaacaaatgtaactactccaattcttagtcatatgcctggttggttccagtggattatggaacttctaatgccaaaccttgatgttgctctagtaatgcaaaaagttgtaccttttgttgaacttgcaatcggtcttgctatggtggtaggtctattcacttggcttgtaagtatcggaagtgccggattcctagtaatgtttacactaagcgctatgcttggttgggacaaattctgggcgttaccagcttctatcgcacttctaaatggcgctggacgcacatttggtcttgattattgggctgttccttggttccaaaaacatcttggtcattggtggtacggtaagccaagatccgtttacagagacaagtaatttagttagttaaaattttaaataaaaactcgggagtgcatccaaaagccagttttggcataggaggtgcttccgtttttattatttgttgatttcttgaactttttcctattatatttaggcattatcctttaaaataggatttgtacatttcattttgaaaggaggcaatacggtgaagaagtatctttctatggtgaagcgttgggatattattattattttatctctttgtatactctcctttttgccgattgctattttttcatatgtaaaagcgaatgaaccggctcctgctaacggaaaaaaagagcttgttgcagttatttctgttgatagtaaagaatataaaactgttacgctcactgggcacaaagggacggaaagctttgatgtgaaacaaccagatggaccttactaacacgattgaggtttcgggggaagaaatccgaattagtaaagcgaactgtaacgatcaagtatgtgttcggactggagcaattgtaaacaagcgatcagtgttgcttccatagtagtatagacacggtgtacttccacc

SEQ ID NO: 3725 - DNA, 4517 bp, Listeria monocytogenes 4b
  misc_feature (1)..(end): n can be any nucleotide: a,g,c or t/u
ggcatgttgaaggtgctttcaacggtgctgacaatgacaaaggtggacttgtagaaaaagcggaaggtggaattttgtttctcgacgaaattcaccgtctccctcctgaaggtcaggaaatgattttttacttaatggactctggtacgtataataaacttggcgaaacggatcgaacccgaaaatcgaacgttttaattatcggtgctactaccgaaaatccggaatcttcgcttttgaaaacgtttatgcgtcgtattccgattattattacgctgccaagtttggaggaacgtacggcgtttgaacgtgtggaacttttaaaatacttactttctagtgaggcgcaccgagttaataaaccgattcgtattgaagatgaagctgccaaagcgctgattggtaatacaacttatggaaacatcgggcaattaaaatccaacattcaactcgtttgcgcacaaggtttccttaatagtttcgacaaagatgaagagattttgattgattttaaaacgttgccgattaatataaaagacggcttcttccacttcagtaaccgtcgcaaggaacttcaagcaattgcggaatacttggagccatatacgacgattttccctgaactaaataatacgttgattacatcggacgaatatgagccgaatttcaacctttacaaaatcattgaagacaaagcatcgattttaatggatcaaggtgtggaagatgatgatattaagaaatttatcaagatggatatcgatattcaccttaacagcttttacaataagtttaaaaatacgatccacaatcgcgaaaatatcttaaaaatcgtcaatgaagagatcctgaattttgcggaaggtgttgaactccgaattgaacatcagcttggtaaaaagttaaacgagcgcttcttgcttgcatttagccttcaccttacctcttttattaaacgaattgaaagtaacaaaccattaaaatatacgaatatcgaaaatgtggtcaatgatcaaccggaagcctatgaattatcacgggaaattaaggatgatattgaggctactttccacatccgggttcctaatatggaagtcatgtatttaacactactcattagttcccttttaaaagaacaagaaaatgctcgtgtcgccgtactcgtcgcaacgcatgggaataatacagcgagtagcatggttagtgttgcgaaaaaactactcggtgaaggactcgtggaaggaatcgatatgcctcttgatcaaagtccgaaaatcgtgcttgataaattgaccgagcgcgcgaaagaaatggatatggggcgcggtctacttcttctggtcgatatgggctcccttacaagttttgctccggtcatttcggaacgtactggcattccagttcgctcgattgatatggtctccaccgcaactgttattgaagcagttcgaaaatccaatattctcgacatggaactcgatagcatttacgattccctgaaagatttccgaggttatggtggctataattctgatgacgatacacttgattccaatcaaaaaccacacgccatcattaccatttgcgcgactggcgaaggtactgcagaaaaattacaactgtttatcgaaaatattttagataccattacgacagatgccattaaagtgattccgattggtttgcatgaaatggatacgaaattggagcagttacaagaagaaaatgatattttgatggcagtcggtattcaagatccgaaaatccaaatccccttcatcccgctcgaacgacttttcggaattgatggcgaggagcaacttgttagcctcgtgaagcaacgtaatattatcgtaaaaaaaggcgaaactggtcgcatcgcaaaagaaattatcgaagaaagtcttaacgaatttctaacctacctcaatccgaagaaaaagattgaaattctaagctcgtttgctagtgtactggagaaaaagctaggatacaaacttgataatacctttaaaatcaatctactcatccatgtcggttgcgccttagagcgtatggttctaaatgatggtttaatttaccgtgaaccaaaagatatgcttgaaacaaatatctttaaagcgctggaacaaacaaataaagaagttatctacaaaatgaacttaaaactgacgaatgacgaactatgttatttgtatgatattttgaacgaaatccaaccagaagtactttcataattacaaacaagccaacattttttcataagttggcttgttttattttcagcaattgcgttttctggctaatcttttagggtaatgatgtatgtatgtctaagattagtacttagtgtattaagctacgtatctagcgtattaaggcgcgccgcttctgttagtacacgcttacaaaagccttgaaccgcttctattagcaaaggaggttgtttaatacagaaatgttggcacagtttttgcgttagtattaatggatgattatatccacgcttaaggaggagatacctatgccagttggaattatcattggcacacatggtgaagctgcgcgtgaattgttgaaatcaactgaaatgattatcggcaaacaggacaatgtagaatttattacttttgttcctggagaaaacactgatacgcttattaccaaatacaaagaaaaactagacaaattggatacttctgaaggcgttatttttatggttgatttatttggcggcagtccttataacgcatctagccaaatcgcccttccagaagacaatatggatgttgtcacgggggtcaatattcccatgttacttgaaacgctctcaatgcgggctgcaagtaatcaaaaagatctagttgaaacagctcttacagcaggatcaggtggcgttaagtcactcaaacaatcattaccaaaaatagaaaccgaagtcggggaggacgatttataatggaaattcgcttagcacgtattgatgatcgcttaattcatggtcaagtagcaaccgtttggacaaaagaaacgcaggtagaacgtatcatcgttattagtgacgatgtagcaaaagatgaagtgcgtaaaacacttcttacacaagtagcacctccaggagttaaagcaagcgtcgtggatgtacaaaaaggtatccgcgtatacaacaaccctaaatatgctacaactccagtcatgctattattcactaaccctaccgatgtgctaacactcgtagaagcaggtgtaaacattacaactgtaaacattggtggtatggcattccgcgaaggtaaacacatgattacaaatgctgtgtctgtggacgaaacggatgaagcagcattccgcaaattagatgaaaaaggaattgaacttgaaattcgtaaagtcgcttctgacaataaagtcaaacttatcccattactagataaagataaataattcatccgcggctcgcttgttttttagagccccgaaaatgcaaacgtttaaaggaagacctttaaaggggtgattcatgaataaaagcttatgtaatagatgcttaatttattcagtcatcataatgaaattatctttttttatcattctaaagaaaaattgggagggaaatatatgtcagcaatacaattaatccttgtattcctcgtatcctgtattagtggtatgggtagtattttggatgagtggcaaacgcaccgtccattaattgcctgtacgttaattggtcttgttcttggggatattacaactggtattattattgggggaacacttgaaatgatcgcgcttggatggatgaatatcggagctgcggttgctccagatgctgcccttgcatccattatttctactatcttagttattactgggggacaagatatcagcgtaggtatttcgcttgcgattcctctagctgctcttggtcaagtacttacaattctagttcgtacaattacagttgcattccaacacatggctgataaagctggtaaggaaggtaatctgcgaagtctcgactggatacatgttacagcactactacttcaagctatgcgtattgcaattccagccgttatcgttgcggtaacagttggtacacaagcagtcgaaaatttactcaatgccattccggacgttattgttaatggtctaaacgtagctggtggatttatcgttgttgttggttacgccatggttattaacatgatgtccgctaaatatttaatgcctttcttcttcttaggttttgttgtcgcagcatttactgcgtttaacttagtagcactaggtgttttaggactagttgcagcaatcatttatatccaactaaaccctaaatatcaattgaaagaagctatccaacaatacggcgggggcggcggcggacgatcagcggatgatgatctcgacgacgaccttgacgactaaggaagggggagaaaaatatgagtgaacaaattacagttaatgaaaagaaaataaccaacagtcacttaatgggagtgttcata

SEQ ID NO: 3726 - DNA, 4378 bp, Listeria monocytogenes 4b
  misc_feature (1)..(end): n can be any nucleotide: a,g,c or t/u
agcgtgtcatgatgcgggttttctgtatacatacgcggatcttcttgtgtaaaaaaaggatatccgccaatttgactacattctttacccagttgatataatgcttcagatttatcttcatcctccgcgaaaatttggtcagccagctcataaaaattacttccaaattcattttcaaaatcaaagctatcttgtaatagaatctgatctgaaacttgcccagctattttaaactcaccattaacaacggggtaaaagtccgactttgctacatcttcaaaaaatgcatcttgttcttcagcagttaagctctcacttcccaagtcatcaaagaaaaacactcgaaaaccttcttggctcgttggattttcaaaattaagtccgtacaaatcatcttgataatccacataaaaagcgagtaagccaaattccggataattttccatttgtggcatttctgaaaaattaatttgtgttaataaagacagcggtttaccttcttcggtcactggatagccatgctctctcggcaagtaaccacgcccaccagctttactttgcaacaatgaaagcttaccaacatccttaaaatgcagttctatacgctctttctctgtttctaaaaatcgttctgcccattcactaggaagtatatcaaaaagttgttccatgacttaccttctttctttttttctaattataacatgaaaaaagcgccatatctgacaaaagcagatacagcgcttcttgagtttttatttatagaatttgaatttccctttacttgccaagacgcctgaaccaccaattagtaatagcgcgcggtcatcaatgacttttttcataacggaagctggatagcctttcaagtttttaccgaaaacgacaccaattgcatcgttatcgcctagagagcaaactgttcctttttcatgataaacaaagtcttgtagatctgtttcgcctttaactaatttagctaagttcactgcagccacatcggcttgttgcattgcgatttgggcagttggtgggaatggacggtcgtttgctgggttgatgattagtgagcagtcaccaacaattaaaatttcctcgttaccaggaacagttaaattgttgtttactttcacacgaccacgaccagcttcaaagccagatgcttcaattacgctattgccacgaacacctgcagcccaaataatggttgctgctttgatttcacgaacttcattttcactttccgcatattttacgccatcagcggtagcttctttgactggtttaccgacatggaattctacgccgcgatcttccagtacaccaacaccataatcaaccagtttcgcatcaaattgtggtaatacttttggagctgcttccatacaataaatgcgcactttttcgcgaggcacatcgtactctttcactagttctggaatgcgattagttaattccccaagaaactcaattccagtaaagccagcgccaccaacgataattgttaataattcatcgcgtggatctgttttccatttagcaaattgcgcttcaatgtgcgcacggatttttttgacggattctacacttgtaatagtgaaggcatattctttcaaaccactgattccaaatgtttctgcttctgacccaagagcaattaataaatagtcatagctgatatcgccatttgcatctagtgtgactgttttttcgtctttattaatttttactacagtatcttggataaatgtagttttcgtattgtttacgactttatcaagtggatacattagtttttctggctcaattgttccagctgctgcctcgtgtaaccaagtcgtttcgtggtgatagtcattcttattcactagaacgatttcggcttccaagtttctttgttgtaacttgcgtaaagtttttagtcccccgtatcctgctccgagaatgacaatttttggtttactcatctgttatcacatctactttcccttatatttttcttcacaaaaaaaattgcattaagaatttcttactgcacctatgtagattgcgctaaaaatctactgcaaacaatgaataaagtgaaaatggtaagtaccaatatattccctatttcacagcttacaaactatatcatagactttttcacattcattttcaagaaagcgaactcaagggtttaagcttctttgtagcatggttcgagtggtatacgatttttttcacaataaagctttgagatggcttgattttcgtaaatatcttttatttgatggataattggtctagttcattttttccatattttaatggagacaatcccgtaaacattctttttcaacaatatatgctaaaatatgcttattgcaactttagcgatttcatagggaaattacgaactagggggtgatgtattttggatgaaaaaacaaaaatttatgatatcacgatcattggtggtggaccggttgggctatttgctgcgttttatgccggaatgcgcaatgcgagtgtgaaaataatagaaagtttaccgcaattaggtggacaactttccacgctttatcccgagaaatatatttatgatattccgggctatcctgctgtacgcgcacaggaacttgttaataatttgattcaacaaatgaaaccatttgatccaactattgcgctagaggaagcggttcaaagcgtagaaaaacaagttgatggcacatttgaaatcatcacgaagaaagatacacattacagtaaagctgttattattaccgctggaaatggcgcatttgaaccaagacgtttggatcttccagaagcagagcaatacgaagggaaaaacattcattatttcatcaatgatttaagtcgcttttcaggtcgtcgcgttgccgtttgtggcggtggggattccgcagtggactgggcgctcatgcttgaaaaagtagccagttctgtcgcgatcgttcatcgtcgcaatgctttccgtgcgcacgaacatagcgtaaacaatttagaaaaatcttccattgctatcaaaacaccatttatcccaactgaagtacttggtaacggtgataaattaacgcatattactttgcaagaagtcaaaggtgatacaagggaaacactggagattgacgatttcatcattaactatggtttcgtttcttcgcttggtccaattaaaaattggggcctagagctagaacgcaattcgattgtcgttaattcaaaaatggaaacgagtatcccaggaatttattgtgcaggtgatatttgcacgtatgacggtaaagtaaaactaatcgcgaccggattcggtgaagctccaacagccgttaataacgcgatgaatttcattgatccaaaaacacgcgtgcaaccaatgcactccacatctttgttcgaataacaaccgaaaccacgaggcgacttgtggttttattttttactcaccgggaaaagttctttgtagatattttttaggaggagattagcaatgaatgtactcgtaattggcgcaaatggcaaaatcggccgtcttttagtagaaaaactcgccatggaaaaaggctttttcgttcgagcaatggttcgaaaagccgaacaagtaagcgaacttgaaaaacttggcgctaaaccgattatcgccgatttaaaaaaagatttccactatgcctatgatgaaattgaagctgttattttcacagcaggatccggtggtcatacgcccgcttccgaaactatcaacattgaccaaaacggcgccatcaaagccatcgaaactgctaaagaaaaaggtgtacgtcggttcatcattgttagctcttatggcgccgacaatccagaaaacggtcccgaatccctcatccattatttaaaagccaaacaagcagccgatgaagaactaaaaagaagcgatctcgactacaccatcgtccgcccagttggcctttcagatgatccagctactggcaaaatcgctgaagtttccgaaaaacctacaacgactatcccgcgcgctgatgttgcagattttattagtgaagctttatccgaaaaatctagtttctataaaacctataccatcgaaagtggcgacacacccattaaacatttttttgattaataaaaagcgatgagccaaattacgcgctcatcgcttttttctatattaaaacggattctcttccaaaaatgtatatatattcgcaaccaattcttctgctgtttctccgcggaccacttccccgtccactaaagcaaacaaactcgtcgcgcataaatcacaatatgtcagacaatcatattcaatcacgtctaaactatcatccgcatctaatttcgcaaaagctgcatctgcgccgctcgccaaatt

SEQ ID NO: 3727 - DNA, 3943 bp, Listeria monocytogenes 4b
  misc_feature (1)..(end): n can be any nucleotide: a,g,c or t/u
tatttccatttttaccaggagattcattactattcgcagccggtgcattatctgtattagatggttcgattttacatattgttccgctaattattactttatggttagcagcagttctaggcgatacagtgaactatcatatcggtaaaaagattggaacatccataccagaagatagctggtttgggaaactaataaataaagaaaaaatggaaaaagcggaggcgttcttcaataaacatggtggaaaaacaatttttattgctaggttcatgccttttattcgcacgttcgcgccatttgtagctggagcaagccgtatgaattatcgttatttcttaaattataatattttaggggcaactgtttgggtattactttgtacgctcgcgggttacttcttcgggaacttcccaatcgttaaagacaacttctcgttagtagtaatcggaattatcgtagtttccgttatcccaatggtagtttcgttcattaaaagtaaaatggacaaaaaaagcgcagaataatctctgtgctttttttatttcccgggaaatctctcgcatacatgacaaacttttggggtaattagttaggaagaggtgatgaaaatggaacaagcattgaatattacatctgaaattggcaaactccaaacagttcttgtaaagaggccgggttctgaactcgaaaatatcacaccagaatacctagaatctttattatttgatgatataccgtatttaaaaatgatgcagaaggaacatgatttttttgctaaaacaatgaaagattcaaacatcgaagtactctacttagaaaaactagctgctgaagcattacgagaagctaacaataaagagtcttttttaacgaaaatgattaaagaatccaatcaaatggacgaaagtgcgctatatgtacgagattatttgatgtcttttgacgaggaagaaatgattagaaaacttatgtccggtttaaaaaaatcagaaatccccgaacgcaaaaagaaacacttaaatgaaatgatggacgaacaatatccatttttcctagatccattaccaaatttgtatttcactcgagatccagcagctgttattggtaacggtgtgacgattaatagaatgttccagccagctagaaggcgagagtcgatgtttatcgagctgattttgaaacatcatcctcgttttagtaatcaagaaattccggtatggtcagggcgcggagagccgttttctttagaaggtggagatgagttagttctaaatgaagagactgttcttgtcggtgtatctgagcgaacggatgcacgagcagtcgaacggcttgcagaaagtttatttagtcgttctccaaaaattaaacgagttttagctgttgaaattcctgaaacaaggtcatttatgcatttggatacggttttcaccatggttaattttgcacagttcacgattcatccagcaattcaaaatcaacaaggagaacttaatatatacattttagaaaaaagtgagaatggattagaaattactccgcgaagagattttcagcgcgtgattgcggaggttttggatgagccagaaattgattttattccttgtggcggagaagatgtaattgtttcggcgcgagagcagtggaatgatggggcaaatacgttagcaattgctcctggagaagtaattacatatgatcgaaatcaagtatcaaacgatctgttaagaagtgcgggtattaaggttcatgaagtgattagttcggagctttctagaggccgcggggggccaagatgtatgacgatgccgcttgttagagaaaatctaaaataagtctttaaaaacgagaattcccctgcaaaacaagactttcgtaaaaagtattgccggctattttgagatgtgctatagtgttttcaaaccagaattttcgagaaatatcttgctggttagttagcgctatgatataatattttattgtgagtaattataaattattccttgctcgctcttgattttaaggcttgctaaaggcagtctgaatttcagggatatggtatggtttcatgctatatcagagccgcttaagaccacaaggaggtgtagagtagatggctagaaagtacgaaattatgtacatcattcgcccaaacattgaagaagatgagaaaaaagctgttgtagaacgctttgacggaatcttaactgaaaatggtgcggagatcatcgaatcaaaagaatggggtaaacgtcgcttagcatacgaaatcaatgactatcgtgatggtttttaccacatcgtgaaattaaacgctgataaagcagattctatcaacgaatttgaccgtttagctaaaatttctgatgatatcattcgtcatatggtaattaaagaagaagcataagaattcattcaaggctaggaccttgatttactaaacgagaggaggttggttttgcatgatgaatcgtgtagtacttgtaggacgcttaacaaaagatcctgaattacgttacactccagctggtgtggctgttgcgacttttacattagctgtaaatcgcactttcactaaccaacaaggagaacgagaagctgactttattaattgtgttgtttggcgtaaaccggcagaaaacgttgctaatttcctgaagaaaggaagcatggcgggcgttgatggccgtgttcaaactcgtaattacgaggggaacgacggtaaacgtgtttatgtgactgaaattgtagcagagagtgttcaattccttgaaccgcgtaattctaatggcggtggcggaaataactatcaaagtggcaataacaacaataattataatagcggtggaaataacttcggacaagcacctacaaataacggtggattcggacaggaccagcaacaatctcaaaatcaaaattatcaatccactaataatgatccttttgcaagtgatggtaagccaatcgacatttctgatgacgatttgccattctaaattcattttagcggtttgaactttaagataggaggaactttcaatggctggaggacgcagaggcggacgccgtcggaaaaaagtatgttactttacttccaatggtattacgcatatcgactataaagatgtagaacttcttaaaaaattcgtttccgaacgtggtaaaattttacctcgtcgtgtaactggaacaagcgctaaatatcaacgtaaacttactgttgctatcaaacgctcacgccaaatggcattactaccatttgttgctgaagaaaaataaattaattttaacagtctagaattcatttctagactgttttttcataaattagaccttggatcatgtgaacctaggacctaagaaggaagttaatgctatttattcatgttattcttatatagaagtaaaaaaatgcacagggggaaacaattatgtatagaaaattagcaacagtagggatgacggtattattagtaggagcattatcagcatgtagttttaatgatgataaggatacatcatcaaataatagcagcaatgaaactactagtagcaaaagcagtaataatgaaagttcatcagatagcttgcaaaacaaaagcttcgatatgagttatgaagacgcgattaacgcattcaaagacaaacatagtgatgcagaaatatctagcgttgaattagagaaaagcttgggaaaatatgtctataaagttgatgggatttcaaatgataatgaatacgaaatgaaattcaatgctgaaacaaaagaacaactaagtgatgaaacagatcgacttgaccgagaagatgcaggtggagttgaaaaagaaaacgaaaaacttagcttagatggaattaaatcaccaaaagaagccatggataaggctgtttctgaacaagctggtgacgtaacaagttggaaaatagaaagagaatt

SEQ ID NO: 3728 - DNA, 3957 bp, Listeria monocytogenes 4b
  misc_feature (1)..(end): n can be any nucleotide: a,g,c or t/u
taaatccttatcgtttagaaggtcaaaaaacagctgcattcgaaatttgtgagcaattaggttctgctccagatgtccttgcaatcccagtaggtaatgccggaaacatttctgcctactggaaagggtttaaagagtggaatgaggccaaggcttctggacttccacggatgcatggttttgaagcggaaggtgcggctgcgattgttcaaggtaaaccgattgataatccggaaacaattgcaacggcgattcgtatcggaaatccagctagttgggagcttgcagaagcagctcgcgatgaatctggcggatatatccattctgtaacagatgatgaaattgtaaatgcgtataaaaaaattgcagcacaagatggtgtctttatcgagccaggttcagccgcttcattagctggtgtcatccaacatgtagcaaatggaacaattaaaaaaggcgaaacagtagtttgtgtctttactggaaacggcttgaaagatccggatactgcgatgagtgtgcatgaaattccaatttctcatgtggatgatatcgaagcaatgcgcacacatttacgttcaggagtgaaagcttaatgcgtattcgtgtaccggcaacaacggccaatcttggccctggctttgattcgtgtggtttagcgttaacgttatatttaacgcttgatattggagcggaagcagactcttggtatatcgaacataatattggcggcgggattccacatgatgaaaccaatgtaattatcgaaacggccttaaacctggcgcctaatttaacgccgcatcatttagtgatgacctgtgatataccgccagcccgtggacttggtagtagttctgcagcggttgttgcggggattgaattagccaatacacttgctgaacttaaactttcaaaagaggaaaaagttcggatagctgctgaaatagaagggcatcccgataatgttgcgcctgctgttcttggaaactgggtcgtaggagcgaaattagatggagaagatttctatgtacgccacctttttccggattgtgctttaattgcttttattccaaaggcagaacttcttacttcggaaagtcgcggtgttttgcctgatacgcttccattcaaagaagctgtccaagcgagcagtatcgccaatgtaatgattgcagcaattttacgcaatgatatggcgctagctggtgaaatgatggaacgtgatttatggcatgaaaaatatcgcagtcaattagtgccacacttaacacaaattcgcgatgttgcaaaaagccaaggagcctatgctgcttgtttgagcggcgcgggcccaactgtcttagtgttcgctccaagaaacctcgctaacacactgcaaacatctttacaaacactggaaatcgatgcagacgttcttcttcttgatgtcgaagggagcggcgcagaagtttttcgttaaaatcaagctatgcccctatgcggcgtagctttttttaactatatgtcccaatttgtgccgctctatgataaaataggaaaagagtttataaagttaaagggagcggtcttaatggcacaattatttttccgttatggttccatgaatagtgggaaaaccattgaaattctaaaagtcgcacataattatgaagaacaaaataaaacagtggctatctttacttcaggtattgacgatagagaccaagttggcttcatttcaagtcgaattggactgaaacgagaagcaactcctatttttagtgacacaaatatttttgaaatcgtagcgaatattaaaccaaaaccaaattgcgttcttttagatgaatcgcaatttctagaaaaagaacacgtatttcagttagcgaaaattgtggatgaattaaatatcccagttattgcttatggtttaaaaaatgattttcgaaatgaattattcgaaggctcgaaatacttgctattatatgcagataaactagaagaaatgaaaacaatttgctggttttgtgctaaaaaggcaacgatggttctgcgcgtggatgacaaaggaaaaccagtttatacaggtgaacaaattatgattggcggaaatgaccactattaccctgtgtgtcgcaaatgtcatgccaatccaccaataaaataattaaaagaggtgttgaaatacaatgtatgatcgattacaggcggtggaagaccgttatgatgaactaaatgagttattaagtgatccagatgtagtatcggatccaaaacgactacgcgacctttccaaagaacaatccggcattactgcgacagtcgaaacgtaccgcgaatacaaaaatgtaaacgaacaaattaacgaaacacaagaacacctctaggagaaaaactagacgatgaaatgcgcgaaatggccaaagaagaattcgcggaacttcaaaaagaaaaggcagacttagaagaacgactaaaactattactcgttccaaaagatcctaatgatgacaaaaacgttattttagaaatccgcggagcagctggtggagatgaagcagctttatttgccggcgatttattccgtatgtacagtaaatatgcggaatcacgtggctggaaagtagaaatcatggatgcgaacccgaccggtattggtggttacaaagaaattattgcgatgatgaacggaaatgatgccttttcccgaatgaaatatgagaacggtgcgcaccgtgttcaacgtgtaccagaaacagaatcaggtggtcgaatccatacatcaacagcgacagtagccattttgccagaagcggaagaagtggaaattgaactgcacgataaagatatccgcactgatacatttgcgtctactggtgccggcggacaaagtgtcaatacgacgatgtcagctgttcgcttaacgcatattccaactgggattgtcgtatcgatgcaagatgaacgttcccagctgaaaaataaagacaaagcgatgaaagtattacgcgcacgtgtatatgataaatttgaacgtgaagctcgcgaagaatatgatgccaaccgtaaatcagctgtaggtacgggtgaccgctctgaacggatccggacttacaactatccgcaaaaccgcgtaaccgaccatcgtatcggcttaactattcaaaagctagatcaaattatggaaggtaaactcgatgaaatcattgatgcgcttatcctagaagatcaaacaagtaaattggagcatttaaatgacgcaaattagtcagttgctaaaaaatgctgaagccatccttcttgaaaaagggctagaccaaaatgcagcagaaattttactagaaaccagaatgggactttcgcgttctgagctttggatggaaattaatcgcgaacttgaaccgaatcatgaaaagcaattcgagaaagattttgctagatacttagctggcgagccagtgcagtatattttaaaaacagcacctttttatggctatgattttttagtgacagaagatgttcttattccgcggcctgaaacagaagagttagtcgcttgtgcggaggattttttgaaaaaacattcagttaaaaacgtgctagatgtttgtactggaagcgggattatcgcgattgcactcaaaaaagcatttcctgatatttcgatgacgggttctgatatttctgctccagcacttgccgtggcgaaaaagaatgcattggtattaaatgcggatgtgcgttttgtcgaaacagatttacttgaagcatttaaacaaaacgaagaacgattcgatatgattggcgccaatccgccctatatttctgaagcagaaaaagcagaaatgtcggattatgtgctaaaaaacgaaccttcattagcattatttgctgaaaatgatggactcgctatttatgaacgatttgtggataacttacaatatgtcctaaattcctctntttgggtaggggtgg

SEQ ID NO: 3729 - DNA, 2621 bp, Listeria monocytogenes 4b
  misc_feature (1)..(end): n can be any nucleotide: a,g,c or t/u
ccgtaatggggacttctcacagcatgtgcgagcggccaccagtgtgctggaaagtagtgcagtttgttaggtatcccttgaatagaaaaaacaatgtaggaggaacatctatgaaaatgcttaaaaagggtacaacggttttatttgtaatgattatggcggttatgttagtcgcgtgtggggacaaagaagaaacgaaaacttactcactttcccaaaatggtgttgattctaaattaacattcacatataagggagacaaagttactaaacaaacagctgagaacacaatgtcatatgcttcgctaggtgttgcttcaaaagaagacgctgaaaaaatgcttaaagcaacaagcgataaattccaaggtattgatggtttaaaagaaaagattgaatataaagatgataaagctattgaaacactagaagtagattacactaaaatctcttcggaagatatgaacaaaatccctggtatgtcttcaaacggtgatacttctaaagggattagcatggaggaatctgcaaaaatgctagaatcccaaggctataaagaagtttcaaaataaatttgcaataaaaaaagaagtatccgattcatttggatacttcttgttttattcaataatcttgcgcttcgatgacaacagctgtaccagatgcagtgaccataagcattccgttatcagctccaagcacttcataatcaatgtcaacaccgataacggcatttgcgccaatatctttcgcacgttgttccatttcgcgaattgcttcctcgcgagcattaataagttcatcttcatagccttgcgaacggcccccgaagaaatttcgaagtccagctccaatatctttcatgaagttaacgccggtgatgacttcgccgaaaacgatttttttatattcgataatttgtttaccttcaatatttggtgaggttgttacaatcatgagttatccctccagtttttcttttatcatacctcttactactttttctagtcaaaggatatccggttatttcgtacgatttctcgctttttctatataagaaatagcatccggaactttacacgctgtatttccaaggtttacatgaactttcccgactgatttcgcagcttccattgctttttcgtgcaaatcgtctttgtaaattccacaagtgataataaaaccgttcattgaatagcgggttctattggtttctgtttgcagcgtttctttcgcgcgttgaagtaatgcctctgcttcaggcaaattgttaatatgttcgctataaatctgccagcccatggatttagttaaatcataatcactttcaatccacgttttggcgaaaaggagtgcatcatcacgtttgcttacaatcgatgctagtccaaaagttagttgtgaccatgtttcgcgaaaaatgatattccatttttcgatttgttccgtggttattttgtcgggattaatcgctagcaaaccgagataaatcaagtcactattatttgattcaatcagctctacggcgagttcgtgattttttgtcagtttttctcggcgaataattttctttaaatcaccaatttttagtccgtaaagatctaatgaatccggacagccgtgattacgaaaaattttaatcgtattggggttttctaaggcttgtagctcggtattaagttggtcaaaagtaatcgtacgcgtcactcctctcgaataaattaagtataacaaaaaaagcatgcgaaggcgcatgcttttaggatttgagaatattagtcgatttgtttcattgcgtcgtctagaacttttttaagtgtatctgcagagtttttcatttgttctttttctttgtcgtttaaattcatttcaacaatatggcgaacgccttgacggttaacgactgcgggagcgccgatataaatgtcgttcataccataatgaccatctagataaacagaaagtggtaagatcgcattttcgttatttagaattgcctttgtaatacgagctagagctgcagcaacaccgtagaatgtagcgccttttttattaataatttcataagctgcatcacgaacacttacgaaaatagtatccattgcaccttgttcatcttcgctaatccattcagtgattggaagaccgccgacagttgtgtggctccatgctgggaattctgtatcgccgtgttcgccaaggatgtaaccatggacgttacgagcatctacttttagatagtcggcaattgacatacggaaacgtgctgtatcaaggcttgttccagaaccgataacacgttcttttggaagaccggagaatttccatgtagcgtaagttaagatatctactgggttagaagcgattaaaaagataccgtcaaatccgctagccattacttcatccacgatgcctttcatgattttaatattacgatttactaaatctaaacgagtttcaccaggtttttgtgcagtcccggcagttacaacaactaagtccgcatcgtggcagtcgctataatttggtgagtagattttcttcggtgtagaaaatggaccggcatgacttcaatccattgcatccccaatagatctgtctttatctatgtcaatgagacc

SEQ ID NO: 3730 - DNA, 4616 bp, Listeria monocytogenes 4b
  misc_feature (1)..(end): n can be any nucleotide: a,g,c or t/u
ggatctaaagcattaaacggggatgttcccggtgatatcatgttgacccagagacaaaagaggatttccgtaaacaaaacggcgacttactcaagtttgaccaacaagaagctacaaacgcatggaagcaaggcttgaaagaaatcgggaaaaccgaattaacacttacgttaacaagtggcgacacgtccttgcaacgcaaacaaacagaatttatccaaaatcaattagaagaaaatctgcctggactaacaatcaaattaaaaaatgtcacaaaccaagcgagtttccaagcagatgtgacacaagattttgaactgttactaggtggatggggtggcgattatcaagatccgctcacatacctcaacctattcttaacaaacagcccggggaaccacacaggcttctcggatgctaaatacgatgaattagtcctaggagccaagggtaaactttcggcagacccagaaaaaagatggcaagcactactagaagcagaacaaattttacttaaagataacgccgtgcttatcccgctataccaaggtggccgcgcgtacttgcaaaaaagcaacctgaaaaactacaccacgtatccaatcggttcagaaaactacaaatggattgaaaaaaattaatttaaaagagtctagttaaccaaactaggctctatttttatacccgaaagaaaataagacttaggatgtaccaattttcagcctagagccgttcgttcctttttttgatctcctctataataaacctatcaacaaaaaaggacggtaaaaacaatgaaaaagggacttttcggtttactggctgcaatttttgtattaacaatggttgtaattgaattttcagcaccaattggatcggcagcaaatacatattacgttacaatcaaaaacgatggaaaagaagttaccaagtcaaaatttaaagggtactcattccgggaatcgtgtttagataatcaaggaaacagtcacaaagttaacttcatgtcaacaacacaacttaaaaagaataaacagtacaaaatcgtcgttcaagacaatgaattactcgtccaagccaaggaaataaacagtgttccacttgcaagtagtaaataaaattagaaaagaggaaaaaatcatgaatagtttttggaaaatattttttacagttattttaggatttatcgcacttaatatcgtacttgatatcgttggaatcacgcttcacttcttattcccagtacttatactaggtggtattggatatctgctttatcgtatgtggggtaattctccaaaacgctcgagccgcgacaatgaagaccgctacaactggtaatacatttgctaaaaaagctccctaggcttttagatatatggaacctaatttcttttacagaagttaggtttttctgtagtggaagtttgttataataagaggaggaaatgaggcgatgaaaatgaaaaaagatataattctcaaatcagttgttatatcaatcattacagccatagttttcaacatgaagcgtacaaaagtcaaataaccgctcaaaaatcgttattcatgattaaatggctattctaagccatttgcatctaattacagctgacggtatgctataataacaaaaagaaaatcatggaggacatagagatgaatatagaagacaccttactaaaacaagatgtgtggcgatttattgataatacaacgattaatccggctttcgatgccattcaatcatttgcgacagatgatacgctatgtcgctcggtcggagcaagaatggcgccatctactgttcgcggctgggtgcatgaaaaaacagtttcccttggaattcaagattctaagttgcctgatatagataaaggaattgcctttttacaagaacaaggctaccgtgttgtagttagaaattccggtggtttagcagttgtccttgattcaggggtacttaatttgtctatggtgctcccagatgcagaacgcggaattgcgattgagcgtggttatgaaacgatgtttacgcttatcaaagacatgttcgtagattgtaatgaggtaattgaagcaaaagaaatagaagactcttattgtcctggtagttacgaccttagtattcaagggaaaaaattcgctggtatttctcagcgtagaatggcaaaaggggtagcggtccaaatttatttagctattgatggggatcaaactactcgctcagaactgatccgcgatttctatacgattagcggaaaagcaaagcaaacaaaatatacttttccagatgtgaatccgaatgttatgggttcgctttcggacttaatgaaaaatgatataagtttaaatggaacgttagtacgccttttcaacagtttgcggcattacgcaggtgagcttgtatctggtacgcttacgtctgaagagttagatcttttcccagcctattatgaacgtttaattgcccgaaatgataaagtgcttacttgagaggaggaggttgtatgagttatttaacagagaaactaagggaagagaaagtattcaaagacccggttcatggatatgtacatgtttctgataagataatttgggatttgattgctacaaaagagtttcagcgtttgcggcgtatccatcaattggggacaacttcacttacttttcatggggcggaacatagccgttttaatcattcgttaggcgtttacgaaattgttcggcaaataatcgatgtcacatttgcgaatgaaccacaactggatccagaggagcgcatggtggcattgtgtgcagcgcttttgcatgatttaggtcacggaccattttctcacgcttttgaaaaagtatttggaacggaccatgaatcatacacgcaagagataattattggaaatacggaagttaataaaatattgatgagagcaggagaagaatttccgcttaaagttgctgctattattaagaaaaattatccgaatcaaacattggtgaagttgatttcgagtcagattgatgctgaccgaatggattatttgctgcgagatgcctattatactggagtgagctatggaaagtttgatttagagcggattttgcgagttctacgcccaagcccagatggcaatggtgttattgtaaaatattctggcatgcatgcggtagaagattatattatgagtcgttatcaaatgtatcaacaagtgtattttcatccagttagtcgtagcggtgaagtgctattatggaaaatccttgagcgtgccaaaaagttatattgtgctggatatgaatttcaagctacccctattcaagtgctaccattctttttaaatgaagtgagtttaaaagattatattgtgcttgatgatattgtgttgatgtactatttttctatttggcaagaggaagaagatccgattttgagtgatttatgtagtcgctttttgaatagaagattgctacgatacattaactacgatccgaaagaagatgcagaactttacgcagaactaaaaggacttcttgaaaaggccgatattgatccgtcttattatttagtaattgattcttccagcgatttaccttatgattactatcttcctggagtgggaagtggcaaagacccaattaaactattgatgggaaatggggaattgcgtgagttatcgaccgagtctccggttgttgaggcgattggtcgagagcgccggaccgatattaaattatattatccgctcgattttatcgaaagtggacacgtggaagaagcaatcaccgagagaatgatcgccctcatccatgcgcattcgttaaaggaaaaataaaaaagcaaggcgaaatgccttgcttcttacacacttaaatatcagatttccttacgccgccaacaccgtaatccgtttttttcatttcttctaaaatcacatgaatgttttcttttggtgcttttagatttttggcaacaacttccgtcacttcgctaactaaagctttcttttgatcgtccgtacgaccttctaaaaattgaatggtaacaaatggcattttctcacctcgatcaacgtttttttcattatagcatataaaaattgctcaataaaagataaaggaggctcctatgcctagttttctcgcgtatccactcgaaatgataccgtatgttttagttacattattaattgcttttactattcatgaatgggcacacgccttggttgctctcgcatttggagatgatacagctaaaaatgaggggagactctctttaaaccccgttgtacatattgatttattcggtttgctaatgatattaattgcaggctttggttgggctaagccgaccccggtaaatcgatttaaattaaaaaaacgccgccttggaagtatacttgtttcgcttgcaggaccagtaagtaatttcctacttgcgatggttggtgtggggttatatgctttatttctaaattattccttctttacatatggctccgttgcggaaacttttttaatgatttttgtgcaattaaatctagtcttgtttgtgtttaacttgattccgctaccgccgcttgatgggtatcaaatactagtggagtttctgccaatgt

SEQ ID NO: 3731 - DNA, 2852 bp, Listeria monocytogenes 4b
  misc_feature (1)..(end): n can be any nucleotide: a,g,c or t/u
gtacgaggaaatggcgctcaaagaactaaataaattagcggtagaagtagaaacaaagtggggggcggatgttgttatcgtccaccgactaggacttttacaaataacagatgtcgctgtgctcatcggtgtatcaacaccacacagagccgcttgctacgagggatccagatatattattgaacgtttaaaagaacgggtacctatatggaaagaagaaaaagatgtcgataaaacaaggtggggtggcatagatgctaacaacagttaaatttttcgcttttttagctgataagacacataaaacggaagtgaaattgaatttgcagcaatgccagacagttggcgaggttcgagaagttattagtagtgaatttcctgaaatagccgttgatttggcaacatgtatgctagctgtgaatatggaatttcaacaagatcaagaccttttaccagaagaaataaccgaaatcgcagtcattccgccagtaagcggtggataaggagggtaatagatggaaaaagatgatttaacgcattttaacgatgaaaaacgcgcaaaaatggtagatgttacgagcaaatctgaaacaaaacgccgtgcaatcgctagagctacgatacatatgaatgaagaaaccttagcgcgtattcatgctggtaaaattgctaaaggagatgttttggccgttgcgcaagttgctggaatcatggcggctaaaaaaacaagcgaactaattccaatgtgccatccgattatgacgacaaaagctgatatttcttttgaagatgacggtaagaccgcgctaactatcacgtccgaagtcgtaaccgttggaaagacgggcgtcgaaatggaggcgctcacggcagtaaccattgcagcattaaccatttatgacatgtgcaaagcaatggataaaggcatgcggattgaaaaaacgtatttagtggaaaaaacaggtggaaaaagcgggacatttaaagcagaagcgtaactattttgtaggataggagttttgttttatgcaattattaaaggataaatttgggcgggtacacgattatattcgtatttcagtaacagatcggtgtaatttaaggtgtgtgtattgtatgcccgaagaaggcctgacatttttgcctcatgaaaaagtactatccaaagatgaaattgtcagctttatggaattaatggtgaaattcggcatcaaaaaagtccgcatcactggcggagagccgttactaagaactgatatagtggaaattgttcgcgggctgggagcaattcctgaaatagaggatatttcgattacaacgaatgctatgtatttggcaaaaaaagcagaagcactgaaggatgcggggctcacacgtgtgaatatcagcttagattctcttcatgcagatcgttttaaagcaattacacgaggtggccgtttgcaaaaagtacttgatggtattcaaaaagcagaagaagttggactgttcccaattaagcttaatgtcgtactaattaaaggacaaaacgatgacgaaataactgatttccttcgatttacaaaagataaagatattaatattcgtttcattgaatacatgccaattggtcatgctggtacgagttggaaagaaaaatatttgccgcttgatacaatttttgaagcttgtaatgaagctggttatgagtatgaaccagtggactcgattcgtggaaatggcccctccgaaaatttccgtataaaaggagcgaaagggacgtttggtgtgattcacccggttagcgctcatttttgtgatagttgcaaccgactcagacttactgcagatggttatattaaagcatgtttatactgggatgaagaaatgaatatccgcccatttatccaagatccagtgaaattaatgcaattggtgcaaaaagcaattgataataagcctgaaaatcatgaaatggcattaaaattacaagatgaagtacaatctaataaaccaacttggcggcgtatgagtcaaattggaggataaataaaacatccggtcacatgtgtggtcggatgttttatttttgtcgttctgctattaaatgaggtaattctgggataatcaatttttgaacagcgagctggcaagcgttacttgatccaggcaacgcaaaaagcagtaagccgctttctgaaaagccagcgaatgcacgagacaccatggcgcgactaccaacttcttcgtaactgagcatcctgaaaatttcaccaaacccagggatttcttgctgaatcgttgcgaataatgcttcatacgtaacatcacgcctagcaataccggtaccaccatttgtgataaggcaaaaggacccattagctgctaactcgtttattttttgcttaatgagcgtaacatcatcaggcacgacaatccgcgaaataacctcatgcccagcagtttctaaggcagagtgaatcagttgaccactagtatccgtatccaaattccttgtatcactaatcgttaaaatactacaagttaccttaataaatgttttttgttccataactgcctcctttaattgaaaaataagtgatatgtttttttcgcttctgttatattttctgtcccatgaagtaacacgcgtccatttttgaaaataacaaattgaaatttttcgtattggaaactgagtaaagcgggattttcattataaataattttttgttccgtcagcatttgtttaatttcgtgataattgcttttatttggcagacgaaattgtactgtatctcttccgcaaagagcgactgtttgctcggaaaaaggcacttctgaaatcatttttccagttgcgcaaccagagc

SEQ ID NO: 3732 - DNA, 4774 bp, Listeria monocytogenes 4b
  misc_feature (1)..(end): n can be any nucleotide: a,g,c or t/u
tgcgatttatgatcaattagttaaaatgcaaaactttgagttgcatgatgactttacgcttatttgtattaagcgaactaaataagaagaagtgaagacgtacctcattctttagagagcatttactggtgagtaaacgtatttaaagagtggagcgtttttatttttgaatgttttaattttattagttagggtaaaatcgacagtatacttaaaattagatggggtgaagtgatgaatattagtatagaaataaaagaacgtgatactgaccacatagacatatttgttgctggggagatcgatgcttatacagcgccaaaggtaaaagaagcacttgaagtatatcaagtaaaagagggtatagtacttcgaatcgatttaacagaagtaagttatatggatagtaccggattaggcgtatttgtaggagcgtttaaaagcttacgtcaacgccaaagtgaacttgtcttgtttggtttaagcgaccgacttttccgattgtttgaaatcacaggattgtcagatatcattgaaatcaaaaatgtagagggtgaaatgaatggcaacaatgcatgacaaaattacattacaacttcctgccaagcctgaatatgttagtttaggtagactttcattatcaggaattgcaagtcgcgcaggattttcttatgaagcaattgaagatttgaaaatagccgtaagtgaagccatcactaattctgtaaagcacgcatttaaaggagaagatgatggtgagattacagtagaatatcttatttatgaagacaaattagaagttcgtgtttctgataatggaacaagcttcgacttagaaacccgtaaacaagaaattggcccatatgaggtaggggaagatgcggagatgatgcgtatcggaggtctaggtttatttttaattgaaacattaatggatgacgtgaaactttattatgatgaaggggtttctgtcgtaatgaccaaatatattaatgaaaagcaggtggaggagaatgccaaaagtatctcaacctgataaagaggcgaaagaaaaagtctatatatggattgccgcttaccaagaaaatggcgatcaagacgcccaatataatttagttgttcattacaaaaacctagtagagtctattgctcgcaaatattcccaaggtaaatcttttcatgaagatttagttcaagttggaaatattggcttacttggagctattagaagatatgatgcgacgtttgggaaaagctttgaagcatttgctgtaccaaccattgttggcgaaattaaacgatttttacgtgataaaacatggagtgtgcatgtgccgcgccgaatcaaagaattaggtccgaaaattaaaaatgccgtagaagagctgacgagagaactacaaagctcgccgcaaattagcgacattgctgatttcatcggtgtcacggaggaagaagttttagaagcaatggaaatgggaaaaagctaccaagcgctttctgtagatcattcgattgaagctgattcggatggaagtacaattaccttattagatgttgttggtggtacggatgatggatttgaacgtgtgaatcaacgtatgctcttagagaaagttctccctgttttagatgagcgagaacagaagattttgcaatttacatttattgaaaatcgcagtcaaaaagaaacgggtgaactactcgatatatcacaaatgcatgtgtctagaatccaacgtcaagctattaaaaaacttcgagaggcgttgcagaatgaggaagtggagtaaatgaacaaggcagttgaatcaaataatttatttgtatttcaacgttctaaagcattacaacaatactgcggggatgtttattatacccatgaagacgaaaatggttttctgtatgttctttctgatggacttggaagcgggctcgaagctaatagagctgccaaagcgaccgttgatgccataaaagaggatatccatgcagatattaccgatatgctcgaaaaagcgaaccaggctgtttcaggacttcgaggtgctgcgatagctattattaaaggtgactacttaacgaagaccctttattatactggtatgggtaatattcgtttttatatgattgggatggaagataagcttatttttccgctttctggctctggatttttgtccggtcgaaaacagaaatatcggttgcaatcgtttaaatataaaccaggcagtaagtttttaatgcattcagatggacttgttctttctcgcgttagaaaaagcctagaatcgccactttgtgtagtgaaaatcgggcatttaatcgagcgtaatatattagatattccaacagatgatgttacttttatggttgggaaatttccggaataacaaaaacaccttttaaatgattcctagtttaaaaggtgtttttttttaatggacatgagaacttagtctatttatggtatattagaatagagcgctagttttttatacttcatcatgtgataaatatcacttaataagcgtgaagcaatcttgctttgcgttttttcgcgcggattaaaatataaataagagagaaggagcaaattgaagaaagtttggttgaatagtgtaaaagattatacgtgggcgagatttaggaaagacttgcttgcgggaattatcgtgggaattatagctttaccactagcgatgtccttcgcgattgcatcaggtgtaagtccagaatatgggatttattcgagttttgtagcgggaataatcgtttctattttcgggggctcgaagtttcaaattgctggtccaactggtgcttttattccagttttactaggaatcgtattaacttatgggtaccaagatttactcgttgctggaatgatggcaggggtcttactttgcttaatggggatttttaaaattgggactttaattaaatttatcccgcgtcctgtaactatcggatttacagccgggattgctgtcacgatttttatggggcaagtggggaacttcctcggtttaacaggtatggaaaaacatgaatcatttgtcgcgaatatgaatgagatctggttacatttagattcatggaatttctatagtgtgttcatttcctgtatttgtatgcttgtcttatttatttttcctaaaattttaccgagaattccagcaccacttattggacttgtgattacgacggcgattgcgatgctatttttcccggatgcgcttccgacgattgggtcagcgtatggagatattccgagtacttttcctccgtttgaatttcccgatatgacttttgcgaatatgagtaaattgattgggccagcttttgttattgcgatgctcggcgggattgaatcacttctttcagcggttgtggcagatggaatgacgaatacaaaacacaatagtaatcgcgagctcattgggcaaggtatcgcaaatattgtaacgccaatgttcggcggaattcccgcaacgggagctatcgcaagaacggcaaccaacattaataatggcgcaactagccgtgtctctggcgttatccacgggattttcgttttactcactttacttgtacttgcaccagtagctgtcaatattccaattgctgcaatggcaccgattttaatgctagttgcttggaatatgagtgaacgaaaaaccttccagcacattattaagttgaaatcgggcgatactttagtgctaattattacctttttattaacagtatttgcaagcttaactgtggccgtcgaagttggtttgctgctggcagtggtgcttttcgctaaacaaatgggaagttcgatgcaaattgaagaaatcgaaccagaaggcgccgaaattgctcctcatttacacgagaaaattagtatttttactattcgtgggccgcttttctttggtgcagcacagattttccaacaaaatattatcaaagcaatccatgttaaaccaaaatatcttatcttgcgaatggggaaagtgccgattattgatgctacggcagaaggctatttccaccaaattgaaaaagaattttcgaagcaaggcgggcaaattttgattactggactaacagataaagcgaaagaaagtttgaagggtagcgggctttacgaccgaatcggcgaagaacacttcttttcccataccgaagatgcgattcattatgcggaaaatgctttaaataagggagactgatagcttttgtcagttgaaacgtaattatgttacacttagtagataatgaaataattggaggctatcaagtatggaacaaatgcaagataaaataataaaactagtccaaaaatcgctaacgtataaaccagcgcaaatcaatgccgttatcaaattaatggaagaaggcaacacagttccatttatcgcgcggtaccgtaaagaaatgactggtagcttagatgaagtagaaatccgtgatatcgaagaaacctttgaatatgtaacaaaattagaaaatcgtaaagaagaaattattcgcctaatagatgaacaaggaaaattaacagacgaactgagagcggcaattaccaaagcggaaaaacatcaagcgctcgaagatttataccgtccttacaaacaaaagaaacgcacaaaagcaacgattgcgaaagaaaaaggattagagccgcttgctgattggctaatgagcttcccaagtaacgcggacccactgaaagaagctgcaaactatatttcagaagaaaaagaagtggagtcagcag

SEQ ID NO: 3733 - DNA, 4337 bp, Listeria monocytogenes 4b
  misc_feature (1)..(end): n can be any nucleotide: a,g,c or t/u
gactgcagtaactatgccatgcctgagcggcgaaccgtgctccaaagtatattttttagtagatagtattacgggaaatgggtagggtccacttaaaaccattgtagagccagatgcttctttacttagttatttagatcaagcgactggtggtatgtggtctaaaattaacaccgactaccctgatctaaaaaataaatatcttagtactgaagaattaaccagttcattaacagatcagccagaggcaaaaacagctgtagatacgaaagaaattgaagcagcgacgaaagatttaaacaaaaaagcgataaaattagttgatacttatttcacgggcttagaaaaagatcgttttaaagaagcggatgatggtactgttagcgttacgattaaaaacgccgatatcgcgaacttgatgaaccaagtagctaaattaatggatgatgaaaaagtaaaagcagatcttaaagttattgcagaaagccaaggttcagatgcagtaacagattttgattccacgtatacagaaatgaaatcgagtttaacagatgctgcgaaagaattaaaagaaaataaaacgtacttaattaataataaacttactgtaaaatcaggaaaagagaacagcttagatacacttactcttcaaacaaaaatagaagataaatctgatgcgagcgctcctgagtctattagctttacggtgaaaacaaaagcagaagaatttgttccaattgaagattttcctacaaaagatgaagttatttctagcgaagagctaaataaaatcatcacagatgtaacagcaaaaatgtatggcggaatggatataagtggaactaattattaatcaatcgaaagacgcagcgacttaggtcgttgcgtttttttgatttttattttggcgcggctttgtggtatgatatgtagagaaaatgatggacgggtgaggtaatggaattcgaattgataatgacaagtgaaagagagacaaggcttcgcgcaaaacaacttggtgaacaattgacagctggagatgtgattttgcttgaaggtgatctcggcgcgggtaaaactacttttaccaaaggtctcggtgaaggtcttttgattccgcaaatgattaaaagtccgacatttacaatcattcgtgaatataagaaaggacgcttgccactttatcatatggacgtgtaccgtttggaagatgcttcggctgatgaacttggtttggaggagtatttctacggagcaggtgtaagcgtggttgagtgggcgcagtttgttcgcgaagatttgccagaagaatacttggaaattcagctttttcatatagatgagaatacgcgtaaattggttgtgaagccagttggagaaagatatgagcaacttgcaatggaggtttttgggaaatgatacttgggatggatacgtcttccgatacgatggcgatagcgctttttaatgaaggtgtcgttatcggcgaatatacaacgaatttgaaaaaaaatcatagtgtgcggttgcttccagcgattgctgttttgatggaagaatgtggagtaaaacctactgacttagaaaagattgctgtagcaaaaggtccagggtcttataccgggcttcgtattggtgtaacagttgcgaaaacaatggcttgggatgcagggattccgattgtcgggatttcctctttggcacttttagcagagaatggtttgtactttcctggaaaagtggtcgcgttgatggatgcgcgccgtagtaatgtatatgcgggcgtttatcaagcaagcgaaggtgaaatgcagagtgttatcgcggacggacatattgcgttaactgaattactagaacaattcctgtctagcgaggagcccattttatttgtcggaactttaacagaacaaatttgtgtgactgtgacggaagtcctcggtgagcgggcggtttttgcgcaggcagattatacttactcacgagctagttctcttgtaaaactggcagagaatttagacggagaaccggcagacaactttgttcctgattatttaaaactggcagaagcggagagcaaatggttggaatcgaggggttccgagtgagtttggatgaagccttattatttcgggaagcaaccgtgactgacttgaaaagtattatgaatgtcgaaaatgcagcattcacggtaccttggacggaagcagcttttcggaatgaatttattattaaccaatacgcctattatttacttgcgatatataaggaacaagtagtaggttatgcgggtgtttggctcgttttagatgaaggacatattacgaatattgcgattcatccagattatcaagggaatcattatggtgaggcgcttttgcgagaaatgattcgagttgcgaaagagcgtggagttgttcggatgacgttagaagttcgcgtatccaacgatgtagcacaagggctttataagaaattaggatttcaagacggcgccattcggaaaaactattatccggatacgaaagaagacgcgctagtgatgtgggtggacttatgaaaaaaaatacattaattcttggaatagaatctagctgcgatgaaacagctgcttctgttgtaaaaaatggtaatgaaattatatcgagtgtggtggcttctcaaattgagagccataaacgatttggcggggtagttcctgaaatcgcatcaagacatcacgtggagcaaattacgcttgtgattgaagaagctttaaaacaagcaaatgtgacgatggatgatttagacgggatagctgtgacagaaggtccaggtctagttggtgcgctgcttatcggagtgaatgcggctaaaacgctcgcttttatgcacaatttacctttagttggcgtgcatcatattgctggccatatttatgcaaatcgttttgaaactgaattcaaatttccgctactttcattagttgtcagcggcggtcatactgaactagttttaatgaaagcagataatgagtttgaaattatcggggagacaagggacgatgcagctggtgaagcttatgataaagtggcacgtacacttggtctcgcatacccaggcggcgtgcaaattgataaacttgccaaagacggcgaagatacgtttcatttcccaagagcgatgatggatgagggttcgtttgattttagttttagtggattgaagtcttcctttattaacacgcttcataatttaaggcagcgtggtgaggagccaaatccaaacgatatggcggcgagttttcaagcaagcgttgtggatgttttagtaagcaaaacgattcgtgctgctaaacaatacgatgtgaaacaactgcttcttgcgggaggcgtggcagcgaaccaaggtttacgagaacgccttattcaagaagtaaaactagagcttccagagacagaactgattattccaccattagccttatgcggagacaatgcggcaatgattgctgctgcagggactgtgagtttcttacaaggaaaacgtagtggttttgatatgaatgcgaatccgggattattgctggaacatatataaaaagcgcgcgatttttcgttccgcacgcttcggactgcagtgaaagtgaactattactttcgctgcagtctatttttattagctccattttctggttatgcctctaaaatacaactttcgcgccaactctttttctaaagatacttgcatgctataattgtgatgcaaataagtttatggtggtgcaccagcctttttcatccagaaagtaggtggtgtttatgttgttttttaggcgttacctggaaaggataaacgtgtgactgttttcgagagtcttacgctgatgattgcttttgcagtcttagtcgtaacaatcatgaacagcaaaaatgacaaaaaataaaaaccactcataagcctgacagctagtggtttttaaataaatcatataaaaggctgtcaccatcttaaatggtgtttgcgagagagtcatgttgtcgcatggctctcttttcatttatatagtaacacatttacttattacttgccaattttttccttcctaacagatagtatctagttcctagaggataactgctttttacatcgttttatttaaaaattggcgtactttttcttcgtatgtttttggatctatcgtgaatgcttgaccgtgttctgctcctttgacaatccatttttctttatagctattggtagctttataaagttggtctaccatatttgtagggacgaaagcatcagcatcaccgtggatgtaaaaaatgggtacgtctgttttagcgaccgcatca

SEQ ID NO: 3734 - DNA, 3873 bp, Listeria monocytogenes 4b
  misc_feature (1)..(end): n can be any nucleotide: a,g,c or t/u
gattccaaagcgaagaagagatgcgcctagcgttacaagatatttcagcgattttagagacttgtattcgcacgagtgatgtcctttacttattagataaagatgatgcgacttggggactcttgttactaactgacgaaccgggtgggaaattagttgcggatcgaattaaaagccgtatagctgaagccaacaccgaagaatttgccgcgaagtaccgtgtgaagctagaacttcgaattggaacaagccaatttgatagcgaaaaagtcaagacaccacttgattttatcgatttagcaacaaaagaattagaatatgacgtgtaaaatagagagttaccttctataattaggaggtaactctcatttttgattggaggaataccatgaacttagaagaaatagtcgattgtatgctattaaacgaaaatgacaaagaaattcagcggacccaaacagagcaccgcatcaaactagttgatttttggcaagtgaaaaatggggaccgagtgctggaggttggttgtgggcaaggcgatacgacagccgtacttgcgaatgcagttggtgctagtggctttgtgcaaggtattgatattgcaccgcggacttatggtgctccgtttaccattggcgatgcgacagaccatttgcagaaatcaaagcttggtgcgcaaattgattttaagctagggacagatattttaaacggtgatatcacttttccagaaaatgcttttgatgtagccgttttatcgcatgcttcgtggtattttagttccaaaagtgagctcacgataatgctcgaattactaagcaagtgggcgaaacgcgtttgttatgcggaatgggatacgagaattacggatgtaaaacaaacgtcgcatatgttagctgtgctcacccaatcatcttatgaagctttcaaacaagacacgcagtccaatatccgaacattcattacaccaatagatatgcaagaaatcatccaagagcataactggaaaatgggcgcggaaacaagtatcttctcagaaaaaatgcaagatagccgatgggaaattggttatgtaaaagattttatcacaaaagaattagaagcagatttaggtttgccagaaaaatttaaagcatttttactcagtcaaagtaaattaattacgcttgaaaatagtttgccaatggcgtcatactgcacttcttggcaggtgaagtaattttgctttctttttcacaagatttagattttttatgctataatggaacgtattaacgaactaaaggagtgttgaatgtgagagctgtacttactgtaattggaaaagataatgtgggtattgtcgcaggtgttagtaataaattagctgaactgaatatcaatattgtggatgtatcccaaacgattatggatggttattttacgatgatgatgatgtgcgatattagccagatcacgaaagaatttgatgaagtaaaggcagaattagccggtaaaggcgaggacctccaagtaaaaatacatattcagcgggaagaaattttcaacgcaatgcacaaactttaggatgggggcgatgctagtatggaaacaaatcaaattttagaaacgatacgaatgattgaagaagaaaaattggacatccggacgattacaatgggaatttctttgctagattgtatggacggcgacggcgaagtggctcgaaagaaaatctatcaaaaaatcgttaccaaagcgcgtaatttagttgcagttggtgaagcgattgaatctgagtttggcattccaattattaataaacgaatttctgtcactccgattgcgattatcgctggatcaagcgcagatactgactacgtagaatttgcgaaaacacttgatgctgctgcaaaagaagttggcgtgaattttattgggggctattccgcactcgttcaaaaaggctacacgaaaggtgacgaaatcctgattcgctcgattccgcaagcactcgcacaaacggaacgcgtatgctcatcggtcaatgttggctcgacgcgaacgggaatcaatatggatgctgtccgccaaatgggcgaggtaatcaaagaaacggctgacttaacagccgatacgcaaggcctaggttgcgcgaaactcgttgtatttgccaatgctgtcgaggataatccttttatggccggagcattccatggtgttggtgaagcggactgcgttatcaatgttggtgtcagcggcccaggtgtggtgaaacgtgctattgaaaaagtaaaaggcgaaccgtttgatatcgttgctgaaacagtcaaacaaacagcgtttaaaatcactaggatgggtcaactcgttggccaagtcgcttccgaaaaactcggcgttccttttgggattgtcgatttatcacttgcaccaactccagcgattggtgattcggtcgcacacattttggaagagatgggactagaaatggttggaacacatggcacgacagccgcactcgcacttttaaatgacgcagtgaaaaaaggcggcgtaatggcttgtggacatgtcggtggtttatcaggcgcattcattcctgtttctgaggatgcgggtatgattgaagctgtgcagcaaggggcgctcaacctcgaaaaattagaagcaatgacagcaatttgttcggttggtctggatatgattgccgtaccaggtgacacaactgccgaaacattagcagcaatgattgcggatgaagcggctattggcgtcattaacaataaaacaactgctgtccgagtgattccagcaagtggcaccaaagttggcgacatggtcgaattcggcggcttacttggcacggcaccagtaatgccagtaaacggaaaatcgtctgtggacttcattgctcgcggcggtcgaatcccagcaccaattcattcttttaaaaactaacaaaaaaggtttcctccaaatttgcgaggaaaccttttattatgtcgtttttcgttcaactaaatgaaaatctaaatcaagcagtggcaaattgctaccaaataattgattcataatgagcgtaaaagcattttcagcctgcaaatttaccgggtagtgaatcgttgtgatatcaagcaaatgcgcgatttccatattatcgaacccacaaatcgcaaaatcttccgggacactgtaaccaagccgtcttgcttccgtcaaaagcccagccgcaaaataatcattcggtgtcaaaaaggcgtcaggtttatgctctgtttccgcaaaccaatgcgcaatcttttccccgtcttgccgagaaccttgcccgtaaaactgtctaaactcatgcggatcaagctcataacgcgcacaaaagtctttaaaagcaagcatgcgactttgcgtattgagcccggtcgtattcccgtaaacattcacgaattttcgatatccttttgcatataaatgttctagtgcaagcgtatatccatcatattggttcataaatacagaagggattttttcactttcgacacgttgccaagtgacaatcgggccatatttggtgtaatgttcaatcgttttccaatcatttgaccgaatgaccaggacgagcgcatcaatttgtttttggcgcagcatctctaaggcctctagttctttatctggatcaatccgcgtcataaacaatgtgacgttataaccatgctcttgcgctatcatcgtaaaacttttcaaaaatacattcagagaatctgtaaagctaggaataaccatgccaattagcttcgttgccccttttttcagagacacggcgtttatattcggaacataatctaactgatcaattattgtctgaacacgttttctggtttcatcgcttacatagtc

SEQ ID NO: 3735 - DNA, 4763 bp, Listeria monocytogenes 4b
  misc_feature (1)..(end): n can be any nucleotide: a,g,c or t/u
cataagcagtatcagttagaaggcttgtttaacagcaccttccacttatggcaattggcaatatggtattcggcaaccagatttagcaatggtgactcacattgcaacactttatgatgttagtgttgattatttacttggccaacaaagcatcccaacctatgctcctagtgaactccaaaatgagaaagatattgggaaaagaataactaaaattagtgaagatttaaaatatgaggatgatttaaatttagatggacaaccgctaaatgagtccgcagcagcttttttagctgattcgattaattttctttatgaacaagcgaagaaaataaacgattagttcctttgctcgtttaacttttagcgtttttgggaataattaatagagtcaaaataaaaagctaaagggggagtttcatttgtcagaatggtacttcaaaaagaacgaacagaaaatggggccttttacaaatgtagagatgattgctctatatagaaagaaagagattaataatcttacattggtccaaaaatcccctcatccagagtggattgcatttaagcaaacagaattatatcaacatattggaaaccacgggaattcagaattaaaaattagcaaccttttctctgctgtttttaaaaagcactctaaagaagaaggcgaaaaagtctttattgctggtactaagtatactactccagcaataagtgatatccctcattcttggccacatccttgggtattctcccgagttttcttagtgttaatcgtcacgtattttttacttctagcatgtacatatttgtttgataacagtaatacaataccgggccttatggtaattggttcatttgcagttccgttttctgttttattattctttttcgaaacgaatgcacctcgtaacatcagcgtttttgatgtagtgcgaatgttctttatcggtggtgtagcagcgcttgttgcaacacttgttatttactccattattccagttggaaaattaaattattttaatgcacttttggttggttttattgaagaaactgggaaaatgattattgttgctctcttcattcgttcattaaactcgaagtacattttaaatggtttacttatcggtgccgctgttggggctggatttgctgcatttgaatcacttgggtacgcgtttaactatagtgtggatgctgcctttttattcaaagatattcatattgccggtgaaacgatgctcaatgttatctttagccgtggttggcagtctatcggcggccatgttgcctgggctgctattactggtgccgcacttgttatcgctaaaggtgatcaaaaacttggaatgcaccacattttcacaggaactttctggaaatggtttattattccgattgctttacatttcatttgggattgcccgttcaatccgcttccagcaattgcattcaaacaaattgttttaatcattgttgtttggttcgttatcttacgacttattagtaaaggtttgaaacaagtttcagtcatttctgccgcgagtaaagcagctaaataaaaaataagtcctaagaaaatttcttaggacttatttttatactcaaaattaaaaatctgaagctcataaacttgattctaatatggacatatctgcattttcatgtaaaatagaagtattatcttattagcagaggggtcatagaaatgcgcgaatctttaaaaaatagtaagagattagtcatcaaagttggtacaagtacattaatgtatggaaatggccatattaatttacgtactatagaaaaattagcaatggttttatccgatttacgtaacgaaggaaaagaggtcattcttgtttcttctggggcaatcggtgttggttgtcataaattacagctttcagtaagacctacaagtatccctgaccttcaagctgtcgcgtcggttggtcaaagtgaactaatgcatatttatagtaaattttttggtgaatatggacaagtggttggacaggtgttgcttacacgtgatgtaactgacttccctattagccgcgaaaatgttatgaatactttagacagtttattaagccgtggtattatccctatcgtaaatgaaaatgataccgttgctgtagaagaactggagcatgtaacgaaatacggggataatgatcttctttcagccattgtcgctaaactggttcaagctgatttgcttattatgctttctgatatacaggcttttatggtagtaaccctgcaacagatccagaggctgttatgttctctgaaatcaaccaaatcactccagaaattgaagcccttgctggaggacgcggttctaaatttgggactggtggtatgttgaccaagctttctgctgcttcttattgtatggattctaaccaaaaaatgattttaacaaacggtaaaaaccctaccgtcatttttaatattatgcaaggtgaacaaattggtactttattcgcaagtaaaaaggaggaactttcacatgaccgaactcattaaaaaagggagtggcgctaaagaagcttctcaatttttagcccaagcaacaacaaaacacaaaaacgcagcactgcttaatttaagtaatgatttgcttatccatacggctacacttttgcaagaaaatgaaaaggacattcttcgcgctaagcaaaaaggaacacctgaaacgatgattgatcgtcttcgtcttacagaagaaagaatcaaagagatatcggaagcggttaaacaagtggtcgcgttaaaagatccaatcggtgaagtaacaaatatgtggaaaaatgaagccgagttaactattggtaaaacaagagttccacttggtgttattggtattatttatgaatctaggcccaatgtaactgtcgatgcttctgttctttgttttaaaactggaaatgcggtgattttgcgaggtggtagtgatgctattgattccaataaagcattaatgtccgttatccaggattctcttgaggcatctggctttcctcgttctagtgttcaattaattgaagatacttctcgcgaaactgcccaagacatgatgcggctaaatcgctttttagatgtgctcatccctcgtggtggcgcaaggttaattcaaacagttcttgaaaatgcaactgttccagtcatcgaaactggtactggtaattgtcatatttacgtggataaagcagcagaaaaacaaatggctatagatattttagttaatgctaagtgttcgcgcccttctgtatgcaatgctgcagaaactttgctcattcatcgagatgttgccgaagattatcttccagcgatggaaactgcattaaaagaatatgatgtcgaactacgtgcggatgaacgtgcgaagggaattttacaagaggcaaaagctgcgacagagtccgactgggaagatgaatttttagatttcattttagctattaaagtagtcgattccgctgaagaggctattgatcatattaataaatatggcaccaagcactctgaagcaattatttctaatgattacgcgactggtcaagcattccatcaaaaagtagacgcagcagccgtttatatcaatgcttctactcgattcactgatggttttgccatgggatttggcgctgaaattggcattagtacacaaaaacttcatgcacgtggaccaatgggcttaacagaacttacatcgactaaatatattatttttggagacggtcaaatccgtaattaaaaagaaggtagcctatgattttaggctaccttcttttttcatccaaccaatcaattacatcttgaaaaacagtttctttacataattcattcaccagttcatgacgagcaccttcataaattttataagtaacatcctctaccccagctttttctaaggataaagcaattttaggtgtgtcttttccgaaatgccctaccggatcatcacttccagaaagcaacaacactggcaaatcctttggcacactttccaatgtttctttttgttgacttacctttacggcttcaaaaaggttatggaaaaaaccacttgttccaactactggaccgcaaaatggatcttgttcataggcttcataaatcgcaacatcccgcgaaagccaactaaaacgatgattttcattaaatggtttattataaccccaaaatgctaatttatttagaaaaccacttctttttctatcatcttttttcactctttgttttgtaatcatttggcccatttttaaaagagctatcggttgaagtccgctaccgctgagaattactccatcaacttggtgttttgccataaaggttcgtataataaaacttcccatgctgtgcgcaaaaatgaagtaaggtaattcaggatagctttcttttaaataagttcttactaccgcctcatcttctaccatattttgaaaaccagtttctccatctaaatgacctaaagatgcctcatctatggctgatttcccaaaaccacggtgatcatcggctacgacaatatatccagcctgattcaaacgttccgcaaacaagccgtatcttgccccgtgttctgccatcccatgaacaatttgaactacaccaactggatttttcacttcatcccaaatatgtaaatgcaaatcgagtccatctgtagcttttaatttcatttgtttgtacatctgactccctgccattccatcttattattattataccacctcgacctcctgata

SEQ ID NO: 3736 - DNA, 4313 bp, Listeria monocytogenes 4b
  misc_feature (1)..(end): n can be any nucleotide: a,g,c or t/u
ggtgggggggtgggcgccggggggtggggcgggtgcgagggtggggaggggggttggggcaattaagtagtagtgagagtgggggtgtggggtggagtaggagggtgcgggcggtccagggggctcggcggcgtcgggcggttgacggggtaggaaaacgggagggcgcgaggggaagggcgggggggtggggggggggggggcaggagggaggtgtcgggtgtgggtggaaatccagaggggctcgggatttaattcaggatataggcttttcccctacatctattttaagctaaattatcttaatcaatgtcccgtttacccgaagacgtagtaagtagcggtttgagagtggattaatatgaacatcacttgcatgtacacgtaatgcttgagttatcatgtgttctgtcattttttgcggcataagaacctccttacaagtcatattcctcaaaagtaaacaaaatcctttgtgtcccaatctttcacaaaaacgaaaatagtattttctaaatgcaaaagtagcatttcaagctaaaataatattgaaagtggtattttagaagcaaataagtgaataaaaaatttttttcgattttgatgattttcacaatctatgtgcaatgaataacaagcgtataattaaacggtaatatcgcaataaagcccttacattccgaaccaatatcaaaaataaagaaaatttaagctttaaaactaattatttgccgaacaatacaactcatgataagctatagaaaaggcaaatacataatagaattagcgggtgaatgtaagcagagagactgcgaaaagcggcgccgacggggaaagcatgtattatgtgaaactctcaggcaaaaggatgtttacgggacgcaactctggagtcatttttgtgttacgacagggcttatgaaccatataagcctttttgttatgtgaaaaaggaggatataattatgacagagttactaaaaacaccgattcatccactttatgcaaaatatggtgcgaaaaccattgattttggtggatgggatttaccggtacaatttgctggtataaaagcagaacatgaggccgtgcgaactgatgcagggctatttgatgtgtctcacatgggagaaattctagtaaaaggaccggatagtacttcttatttacagtatttgttaaccaatgacattgaaaaaataaaaatcggaaaagcacaatataatattatgtgctatgaaactggtggaacagtggacgatttagtagtttacaagaaatcagaaacggaatacatacttgttgtcaatgcagcaaatacggataaggattttgaatggatggttaaaaatattcgcggggatgtttctgttaccaatgtatcttcggaatatggacaattagcacttcaagggccaaacgcagaaaaaattctcgcaaaactaacggatgtagatttaagttcgattagcttctttggatttgtggaggatgcggatgtagcaggagtgaaaacaatcatttcaagaagtggctatactggagaagatggatttgaaatttatatgccaagcgctgatgcaggaaaagtttttgaggcaattttagctgaaggagtagctccaattggtttaggtgcacgggatacattgcgcttagaggcggtacttgcgctttatgggcaagaattgagcaaggacattacaccacttgaagcagggcttaattttgctgttaaattaaaaaaagaagcagattttataggtaaagaagcgcttattaaacaaaaagaagtagggctgaatagaaaactagttggtattgaattaattgaacgaggtattccgcgtcacgattatccagtatttctaaatgaggaagaaattggcattgtgacttctggtacccaatcacccacacttggaacaaatattggtcttgctctaattgatacagcttacacagaaataggtcaagaagtagaagtaggtataagaaacaaaaaagtaaaagcgaaaatagtaccaacaccattttataaacgcgcaaagtaaaaaggaggaagtaatatggcaaaacatcgttatttaccaatgacagagcaagatgaaaaggaaatgcttgatgtaataggggttaagtcaattgatgacttatttcaagatattccagaaaaaattagatttaaacgagattatgatttaaaaccagcaaaatcagaacctgcacttttacgcgaattatcgcaacttgcttctaaaaatgctaatactactgaatatgcgtcttttttaggggctggagtttatagtcattacattccaactgtagtcgatcacgttatttctcgctcagaattttatacagcatatacgccttatcaacctgaaatttctcaaggagagttgcaggcaatctttgaattccaaacgatgattgcggaacttactggaatggacttggctaattcctctatgtatgatggtggaacagcgcttgcagaagcagcgatgctagcaagtggacatacaaagcgcaaaaaaattctcatttccggagctgttcacccggaaagtagcaatgttttaaaaacctatgcaactggccaacacattgaagtagaagttattccagaactagatggaaaaacagacattgaggcgctaaaaaaagctctttcagatgatattgcgggttttgttgtacaatatccaaacttctatggacaagtggaacctttggctgaacttgaaaaattagtgcatgaaaataattctttattacttgtatcgagcaatccgttgtctctaggtttgttaacaccaccaggagaatttggtgcagatattgttgtgggtgattcgcaagtatttggtatcccagaatcatttggtggaccgcattgtggattctttgcagtaacaaataaattaatgcgtaaagttcctggacgtttagttggggaaaccgtagacgagaacgggaagcgcgggtatgtactaacattacaagcacgcgaacaacatattcgccgtgataaagcgacgtctaatatttgttccaatcaagcattgaatgcattagcttcttctgtcgcaatggcaacccttggaaaaacaggtcttgtagaaatggcaaaacaaaacttagataaatctcattatgccaaacaaaaattccgtgaaaaaggctttgaagttctattttcagatggctttttcaatgaatttgttgtaaaactttcgaaaccaatcaaagaagtgaatgaatcacttttagatgaagggattattggtgggtatgaccttggtttttatgaggaaaaatatgaaaaccatatgcttgtagctgttactgaaatgcggacaaaagaggaaattgatgcctttgtggcgagcttggagggtgcaaaatgaatttagaagaaacgatgccattagtgtttgaacgttctattccaggaagaattggctttagtttaccagaaagcgatgttccagaaacaaaagccagtgattattttgaacaagcgtatattcgttctgtaccagcagatttgcctgaattaagcgagcttgaaatcatgcgtcattataccaatttatccaatcataactttggtgttgattctggtttttatccgcttggctcttgtacgatgaaatataacccaaaaatcaatgaaaaagttgcacgctttcctggtttcgctaatatccatccaaaccaaccagaaagctctgtccaaggcgcgctagaactactgtatgatttgcaaacaagcttagttgaaattacaggaatggatgaagtaacgctacaaccagctgctggagcacacggagaatggacgggattaatgctcattcgtgcattccatgaaaagaatggggatacaaaacgcacaaaagtaatcatcccagactctgcacatggaacaaaccctgcatctgcagcagtagcgggcttcgatgttgtcacggtgaaatcgaatgaaaaaggacttgtcgatgtagctgatttgaaaaaagtagtaggcgaagacacggccgcactaatgctcacaaacccaaatacacttggtctttttgaaaaagatattgttgaaatggcggaaattgttcatgaagctggcgggaaattgtactatgatggtgccaatttaaatgctattatggcgaaagttagaccaggagacatgggctttgatgttgttcatttgaatttacacaaaacatttactggtcctcacggtggtggcggtcctggttctggcccaattggcgtgaaaaaggaattaataccattcttac

SEQ ID NO: 3737 - DNA, 4110 bp, Listeria monocytogenes 4b
  misc_feature (1)..(end): n can be any nucleotide: a,g,c or t/u
taatataagcggaaattgtaaacgctttctctatataggaggtaatgtgatgggcgcaaaagtatcggtgcaaattaatggcgtggcgcgggatgtggtggaaggaacgcgaatactggactatttaaatgcagaaggaatacagcatccgcatatttgttatagtgagcaaattggaccaattcaatcttgtgatacgtgtatgtgcgaggtggatggggaacttgtgcgggcgtgcagcacgaatctgacagacgggatggaaattaaaactaattctgaattagcgaaagatgcgcaattagaagcgatggacaggattttggaaaatcatttactgtattgtacggtttgtgataacaataacggtaattgcaaagtacataatacgacggaactgcttggtgtggaaaaacaagaacgtccttaccgcgaaaagggctatttgaatgatttttcgcatccgttttatcgttatgatccggatcaatgtattctttgtgggcgctgtgtggaagcgtgtcagcaagtacaagtgaatgaaacactttcgattgattgggaacgtagtcagccaagggttatttgggatgatgatcgtccagcgaatttatcgtcctgtgtttcttgtgggctgtgtgcgacggtgtgtccttgtaacgcgttgatggaaaaatcaatgcttggccaagctggatttatgactggcttagacgaagatatgctagaaccgatgattgatatggtgaaaaaagtcgagccgaattatcaaaccgtctttgctgtgtcggaaatggaagcagcgatgcgggaaacgcggacgaagaaaacgaagacagtttgtactttctgcggggttggttgtacgtttgaggtgtggacgaaggatcgcaaaattttgaaagtcgagccaaccggagaaggtcctgtgaacaaatttgctacgtgtgtgaaagggaaatttggttgggattttgtcaatagtgagaaacggattacgacgccgctcattcgcgagggtaatgaatttgtgccggcgagctgggaagatgcaattcatctagttgcgaccaaactgcgagaaattcaggctaaatatggaaatgattctattggatttattagttcttctaaaacaaccaatgaagagaactatttgatgcaaaaattggcgcggcaggtttttgaaacgaataatattgataattgttcacgttattgtcaggcgcctgcttcggatgggctgactcggacagttgggattggcgcggattcggggacagtggaagatattgaaacggccggacttgtcattattgttggcgcatcaccagccgatggtcatccagtccttgctagcagaatcaagcgagctcagaagacacgcggtcaaaagctgattgtttctgatttacgaaaacacgaaatggcagagcgttctgatttattcatgcatccaaaacaaggaaccgattttgtttggttaacagcggttgcgaaatatatgattgatcaaggatggcacgatgaagcctttatggaaaataggattagcaatgtagcagattatctatcatttttagaaccatttacattggaatatgcggaaaaagaaacaggactatcagtagaaacattgaaaaaagtggcgcagatggtttatgaagcagacgggacagcggtttgttggggaatgggagttacgcaaaatattgctggatcacatacatcgtctgctatcgctaacctacttcttgtaactgggaacttcggaagacacggtgcgggcgcttatccgcttagagggcataataatgtgcaaggtgcttgcgatatggggtcactacctaacgttcttcctggaattcaaccgcttggaaatgatgaggttcgtgctcgttttgaagaagcttatggggtatcaatttcaccagaaccagggctgaaaaacaatgaaatgcttgatgctattgaggcgggaacacttcattctatgtatgttattggtgaggaaatggcctgggtggactctaactcaaatcatgtgcaagaaatccttgcgagccttgatttctttgttgttcaagatgtgttcttatcaaaaacagcacaatttgcagatgttgttttcccagcagctccttctcttgaaaaagaaggaacatttaccaatacagagcgccgtgttcaacgactttatgaggtgttagagccgcttggagattcgaagccagactggtggattattcaagaagttgcgaaagcgtgtggcagaacggactggaattatgatcatccgagcgagattatggacgaaattgctagtttagcaccattttttgcaggggttcgttatgaccggatgcaaggatttaacagccttgtatggccagtgagcgcggatgggaaggatatgccgttactttatgaagaacgatttaattttccggacggcaaagcgcaattttcgacgttaccgtatattgcaccgattactttcccagaagaatataatttaacgctgaataatgggcgtttattggagcagttccatgaggggaatttgacagataagtcgaaagggttggattataaattaccggaagtgtttgtagaggtatcacatgaattagccaaagaacgcgatttagaaagtggttcgctcgttcgtctaagttcgccttatggccgcataaaactcttcgcgccgttgtgactgagcggatgaaagggaatgaggtctatgtgccaatgcattctgtgtgagtagcgaaaccgcggtcaacttactgacttcaagcgcgggagatgttcggacgaaaacaccggcatataaacaaacaaaagtgaacctcactgtacttgaaaaaacagggaaaaacccacttccagaccacaatccacgtaatcgtaaaagattcccgcaaaatggggctgaggtagcgcgcaaatggtcgagagaagattatcaaccgatttctaaagtgaactgcgcttgtggtggtaactgcgggtgtggtgggaaaaggaggaatcactgatggcagaaccaatttcaacgattcgtgatacaaaaaagaccccggaagaattggaacatgaacgtttagaacaaatgaaagcggatattgctgaacaagattctggttttgtagagatagtagaaacggtaaagttactacaggaatcgggggcacttgaagctttgaatagtgcgattaaagcgcgcggggatattacgaaaacgtttctgaatgaatggcgtaaggaaccgatgacgaatgcgattaataacatgatgatttcaagtaagctattgaccgatacaaaaccagagcaaactgaggaaatgatagccaatttgaaaaatgctgcgaaaaaagcagaagaaagcgcgaaaaaagacgaaatcatgggcatgttagcgatgatgaaggcgctgaaagaccccgatatcaaccgcgcactccggtatggtgtgacctttttaaaagaagttgggcaaacattaaaataagtagacgaaacagcgagactaagatgtgtcgctgtttcagtttagagaggagtggtttttgatggatattgtttcgcaccaaaaaatccgtcgttttgaagcgggcacttttcaagaaattgaatcaagtgttgcgaccgagtatccgctaactatctacgttaacgaccaagaactcgtgaccatcgtctgcacgccagaatatctggaagatttagttgtgggctttctgacatcggaaggcatcgttcggggtcctcaagacatcgattccgtggatatcatcgaagcgactggacacgccaaggttagcgctaattttgtgaacaaattcaatgccaagtatcgcggcaagcgctacattacctcgtgttgcggcaagtctcgggaaaacttctacttccaatcagacgcctcactcgtcaatgtgaagcaaaatggaagtctacaactaacaaccgacatgattttccgcttaatggaaaattttgaacaaaattctgctacattccatcaaactgggggtgtgcataatgcggctctatgtagttcagcggaaattatatacagcaggatggacataggtcggcata

SEQ ID NO: 3738 - DNA, 2840 bp, Listeria monocytogenes 4b
  misc_feature (1)..(end): n can be any nucleotide: a,g,c or t/u
tattaccagatcaacaaactgcgtgcgagaaaatcaccgcagcaactgatcaagaaacattcctaatacacggggttactggaagtgggaaaaccgaaatctatttacaaaccatcgaagcaaaattaaaagagggtaaagaagccatcgttttagtaccagaaatttcccttaccccacaaatggtagagcgatttaaaagccgctttggaagcgaggtcgcggtactacatagtgcgctatcttccggagaaaaatacgacgaatggcgcaaaatcgaacgcaaagaagcgcgcgttgtcgttggggctcgttccgccgtatttgcaccgtttgaaaatctcggcattattattatcgacgaagagcacgaagcgagttacaaacaagaagataatccgcgttatcatgcaagagatgtagccatttggcgcgcaacaaaatatcaatgtccagtagttctcggaagcgccacgccgtcccttgaatcttttgctagagcgaaaaaaggtgtgtatacgttaatcgaacttcctagccgggtcaatgatcgggcgatgccagaagtgagcgttgtcgacatgcgcgaagaattacgcaaagaaaaccgcaccgaattttcgactgaattactagaaaaaatcaaagagcgaattgccaaaaaagaacaaacagttttaatgctaaatcgccgaggttattcttcttttgtgatgtgccgtgattgtggttatgttgtggaatgtccgaactgcgatatttcgctcacctatcatcaatcgagcaatcaaatgaaatgccattactgcggacatgaagaacgtgttccgcaaaaatgtccgagctgtgagggcgagcatattcgttattttggcaccggtacacaaaaagtagaagaaagtttgaccaaattaattccagaagcgcgcgtcatccggatggacgtggataccactagaacaaaaggtgctcatgaaaaattactcaaaagcttccgcaatcacgaagccgatattttacttggaacacaaatgattgccaaaggactagattttccagatattacgttagttggcgtattaaatgctgacacaatgcttcatttaccagactttcgcgcttcggaacgaactttccaacttctcactcaagtaagtggacgagcaggtcgacatgagcggacaggagaagtcatcgttcaaagctataacccagaacattacagtattgaattcgccaaaaaacatgatttcatcggtttttataaccacgaaatgcagctacgaaaaatgggttcctacccgccattttattacttaaccatgattaatgtcagcgatgaaaatgaaatgaaagcgattcgaaccattcaagaaatggctcagtttttacgaggaaagctcggtccagatgccgtgattcttggccctgttcctagcaccatcacgagaattaaaaacaaatatcgctaccagtgcattattaaatataaaatcgaaccaaacttaaaaaaagaactaaaaacactaattacccattatcaaaaagaccaacaaaaaggtttaacaataactattgacgtacagccttacgtactaatgtaaaaggagcaaaccaatgactaaaattatttttatgggaacaccggaattttctgttccggttttaacgcaattagccagcacatatgatgtagttgcagttgtgacacagccagatcgcccagttggacgcaaacgagttttgacaccaccgccagtaaaaaaagctgctttagaactagctattccagtttatcaaccagaaaaattacggacatctagcgaattagaagaactaattgctctagaagccgacctacttgtaacagcagcttacggacaaattttaccaaatagtttgcttgaatcaccaaagcatggtgcgattaatgtgcatgcatctcttttaccagagtatcgcggaggtgctcctgtacactacgcactgcttgacgggaaaacggagacaggcgttacgattatgtatatggtagagaaattggatgctggggatatgattagccagcgtaaaattcccatcacagatgaagataatactggcaccatgtttgataaattgagcaaattaggcgcagaattattaatggacacattacccgactttttagctggaaaaataacggcaatcccacaagaccctgaaaaggtaacctttgcacgtaatatttctagagaacaagaaaaaatcgactggacaaaaccaggacgtactatctttaatcaaattcgaggattgtctccttggccagtggcttatacaacactggaagaaaaaccatttaaaatctgggaagcaacttatgaagaaacaaaagaggacggcgaaccgggtgccattttagcagataaaacaacgcttaaaatcgtagcaggcgacggcacgctcatcgtaccaacagtaatccaaccagcaggaaaaccgaagatggatgttcactcattcatgaccggagctggcacaaatttaacccacaccaccaggcttggcgccttaatgaacaaactcaccacagttcgcgcgattgcctcccacctcctcatctaaatcgctacttgtctcttatgcccccgctcatccaccgatcgacggctccctccacaccctcacctccattccccctgctcacagggtttcccctcctgcctccccccccccgcgcttcctcccctcgtcctccccctcccgccctctcctctccgctgtccgcgttctcccgcctcccgtcacccctccccgcgtgcgccnccacccacacatgccaccatacacacaaaaaa

SEQ ID NO: 3739 - DNA, 2216 bp, Listeria monocytogenes 4b
  misc_feature (1)..(end): n can be any nucleotide: a,g,c or t/u
gcttgcgacagaaggtggcgtatcattcatcttcggctcccagtccatcgaaagtgaagctgcaatggtttctcgcgtgaaaaatcataaagctggtttcggtattagtgattccaacatcagccctgacaaaacacttcaagacatccttgatttaaaagaaaaaacgggtcattctacagtagcagttacagaagacggcacagcgcacggtaaattacttggaatcgggacaagtcgcgactaccgcgtaacgcgcatgagccctgatgaaaaagtagcagatttcatgactcctttcgaaaaattagttactgctaacaaatcgaccactttaaaagaagctaacaacattatttgggacaacaaattaaatgccctaccacttgtagacgataacgagcacctagtccatatggtattccgcaaagactatgactctaataaagaaaataaattagaactacttgattcctccaaacgttacgttgttggagctggtattaacacgcgcgactacgaagaacgtgttcccgctctagttgaagctggcgcagatattctgtgtatcgattcctctgagggttactccgaatggcaaaaacgcacacttgactatgttcgcggtaaatacggcgatacggtcaaagttggcgcagggaatgttgttgaccgcgatggtttccgttatcttgcagaagctggcgcagatttcgttaaagttggcgttggtggtggttccatttgtatcacgcgtgaacaaaaaggtatcggacgcgggcaagcaactgcactaattgatgtggctaaagcacgcgatgaatattttgaagaaacaggtgtatatattccaatttgttctgatggtggaattgtttatgactaccacatgacgctagctctagcaatgggcgctgactttatcatgcttggtcgttatttctctcgttttgacgaaagtcctactaataaagtgaatttaaacggcacgtatatgaaagaatattggggtgaaggagctaaccgcgcgcgcaactggcaacgttatgaccttggcggcgacaagaaattatcttttgaagaaggcgtagattcttatgttccttacgctggatctttgaaagacaatgttgccatcagccttagcaaagtacgctctactatgtgtaactgcggcgcgctcaatatccctgaattacaacaaaaagcaaaaatcacccttgtttcgtccacttctatcgtagaaggcggcgcgcatgatgtggttgtaaaagatgcttcaaataatttaatcaaataaaataaaattggttggtgtgaatttggtaaattaccattctcacaccaaccaattttttatttatacatcttacacaaaggaatatttttctttaatatcttccatcggtagtggtcgactaaaataatagccctggaaatagtctactttcatttcccgtaatttttcgacttgctccatgtcttcaacgccttctgtaactactttcccgcctaaatcatgacacaaattgacaatcgctcgaataataatttgttgttttcgatctgtttttaaaagcgcgataaaggacatatctgttttcacaatatcaatcggtaagctgcgcaaatacgcaagcgaactataacctttcccaaaatcatccatacttactttgacaccaaggtcttttatttttcgtaagtttttatccgctatagctagttccgttatttcgcctcgttcgataatctctatttctaagcattccggatactttaaatgttctttcacataatcatgtaaaaaagtcatatacgtactgctcgctacataatgtgccggaatattaatcgaaattgaaaaacgtcctcctagctgattaatctgttttatcgctgtttcagcaacaaaatcttgcatttcccgcgttgcatttaaaaggacaatatcatcaaagaaatcaattggagccaaaatggttgttgccgtttttaatcgaatcaaaccttcaaagccaataattttattcgttttcgcgtctacttttggttgataatatagcaaataactatttctcctaattgcatcccatatttccgtacttgagatatccatcttatccctcctttttctctagtttacccttttttccatcgaaatgaaaatatagccaaatattatcactacatttacacaaaatccatatttccta

SEQ ID NO: 3740 - DNA, 5775 bp, Listeria monocytogenes 4b
  misc_feature (1)..(end): n can be any nucleotide: a,g,c or t/u
cctcaaaatgcttatagacgttgcgaagttttccattaataaagatcctacaacggaaaaaccaaagccaagatataacggattaagggcagctaatggtaaataagttttacttaaaaataaacttactgcaatcccaccaagcgtcacatgactcagtgcatctgccattaaagaaagttttctaacaacgataaaacttccaagtaatggagctacaataccgatcacaagtcctacaataaatgtattacgaataaaatcatactggagaagcgtcgcaatcaaggcaagcatcctcccttctacgctgttctgctaatatttcaagttcgcggtcagccaaataatgttgatattcatgtgcggaaccgtcaaaaataatacgcttattaatgctaataacatgattgacatacgtattcactgccatcaaatcatgtgtcacgagtaaaagtgtcatttcttctgtccggtttaattcggccaaaagttcataaaaagctttgacattttcgacatccactccaacggttggctcatctagaattaaaagttctggtctgctaactagcgcacgtgcaataaaaacgcgttgctgttggccaccagagagctccccgatgttgcgatgcagataatctgtcatttctactcgctttaaagcgtaatcgatgtcttctttatctttattgtttaatgttttaaataagccttttttctttgttaatccgcttgcgacaacttctttcacagtggctgggaatgcggagttaaaggcgttcgatttttgagaaacgaagccgattttgacccagtctttgaaatctgcttgtttttctccaaataaggagatgcttccttgttgttttttgagtacaccaagaattagctttaacatagttgatttacctgaaccattagggccaattaaaccagtaaaactgccttttgcaacttgaaaatgaatgttttctaaggcatgttctttatcataatgatagcttacattatttacttctatgattttgttcattcatgtttctcctttgacagcatttgctagccgcttttactagtatataaaataatagagaaaatgtaaatcgtaattacttcgaattaaaaaattagacaagaaaacctggaaaagttgcttagcttttccaggttaatataattatttagcaaatgtgtccgttaaaattggaacaacttgttttttacgagatacaacgcctttaagtggtgcttggttttcaacaaatttaacaccgtatgcttcttctacgactgctgtttttgaaccaatagcgattccaacagagtcattagtaaggatattagtgatgacgaatagatataaatcaagccctttatccacaatattttgcgtcataagtgcttccacttctgcgcgacggctaagcacatcgtttacgtccactacattgatttgagcaatttctactttgttatcgttcatgttaaattctttcgcatcaagtaggagttcagctactgtttttttgctaacatctgctcctgcttttagcatttccatgccgtacgattgaatatcaacatctgcaatctgcgccaatttttgagcagctactttgtcttcttccgtgcacgttggcgattgaaaaagaagtgtgtctgaaataattgcggaaagcattagacctgcaactgttttacttacttctacttcattttcgcggaacatttttagaagaattgttgttgtacatccaactggttcagcacggtaataaagtgggtcagatgtttcgaagtttgcgatacggtgatggtcaactacagctgtaactgttacatcgtcaatatcgtctacgctttgttggcgttcattatgatcaacaagtgcaacttcagaaacttcatttgcaactgtttgaactaggcgtggagctgttacttggaaataatcaagaacaaaagctgtttcactattaagctctcctaaacgaaccgcttcaatatctgctccttgtgctttttttaattctgcgtaactaatggcagaacaaatcgtatctgtatctggatttttatgaccgaatacaagtgtttttgtcattattttcgtctcctttttaactattttggattttatttaataaatctgggtcaaattcgccatttcttaacatcgcgatttcccatttatatggtgcttttttcgatgccttatcttcaccaacataaggtgtttcaaggattttcgggacgtccgctaattgcggatgatgcacaatataatgaagtgcgtcaaagccaatgtgaccgaaaccaatgttagcgtgtcggtctttatgtgcaccacattcgttcttgctatcattgatatgtaacacttttaagcgatcaacaccgataattttatcgaattcatttaacaccccgtcaaaatcatttacaatatcgtaaccagcatcatgtgtgtgacaagtatcgaaagtaacggataataattcattatgcgttacgccatcaataatttgagcaatttcttcaaaagtacgtccgcattcagaaccttttccagccattgtttctaaagcaatttgtacatcttgatcatgtattaatgcttcgttaagaccttggataatttgtttaatccctttgtctgccccttcgccaacatgagcgccaggatgaagtacgatttgcttggcaccaagcgcacgcgtacgttcaatttcagattgcaagaaattaacacctagttcaaaggtttctggcttcactgaattgccaatattgatgatatacggcgcgtgaacgacgatgtcagccatatcatgtgctttcatgtgttctaagccggcttcaatatttaattcttcaattggctttctacgcgtgttttgcggagcgccagtataaatcataaacgtatttgagccataagaagctgcctcttcacttgcgccaagaagcattttcttaccactcattgatacatgagaacctaatcttagcataaattcattcctcacttatcgttttttccgtctttcacgacgtttgatttcgttcattttgtagttaattttctttttatagtttggtttacctttttgttttgcttttttacgcataccgatttcacgagggtcagctgtttcgcgtttcgcttcacgtttggcacggcggttgcggtcttcaagtgtaacaaattctttatttttccagtcaacgtgcttaaattcgattcccattttttctaattggtttaagcggtcttcatcagctggttcaaataatgtaagtgcaataccagaatgtccggcacgaccagtacgaccagtacggtgaatgtagaaatctaagtcatcgggcaactcatagttcacgacatgactaattccttgaatatcaataccacgagcagctaaatctgtcgcaacaacatactgataatctaagttttcgatttgtttcatcgtccgtttacgttcacgagggtttacatcaccatggattttcgctacttttagcccacgttcgattaaaccgtttgctacttcatcagctgttgtttttgtatttgtaaaaacaatcgctaaataaggctgtgaaccaactaaaacatttttaagtaaatcaagtttattacggctacgagtggccataatgcgatgttccactgtttttgaagcagccacttttggctgaatatgctcataacgtggattttccatatatttgcttaaaaatggttttaatttttgcggaattgtagcggaaaaaacaagcatttgtaaattagccggcatttttccagcaatatggtcgacatcgtttaagaagcccatatcaagtgtcatatctgcttcgtcaataactaatgttttagcagtatgaacaaataacgcttgctcacgaattaagtcattgatacgaccaggcgttccgacaatgatttgtggttgctttttcagtttatcaatcgcacgttgtttgtctgtgccaccaataacaagttgtacagcgatttctttttcgctgtatttggttactttgcgaatttcattataaatttgagtagcaagctcacgacttggtgccgtaataactgcttgtactgcatctttttcaggattcacattgttaataattggcaaaataaaagtatgggttttccctgtacctgtttgagattggccaatgatactttccccttttaaaatgcctggaattagcttctgttgtacttctgttggctcatagaatcctaatttatctattgcaagtccaataaaaggttgaaagccaaattggtcaaaccttgatttcttcgtcataaaatatttccactccgttctatacctagtagccattatagcacataattggacattcgtgcgcgtgttaagacaactttgtcaaaaacaggctaagtctattatactaaataaagaatctaaaacagaaatgaggatgttttcgaatggaaattatcaaaatatctcctcgtggttattgctacggagtcatcgatgcgatggtgattgctaaaaatgcatcacttgatccgaacttgcctcgaccaattcatattttaggtatgattgttcataataaacatgttactgatgcatttgaatccattggtatttatacagtagatggcgctaatcgagaagaaattttagataaaataaccactggaacggttatatttaccgcacatggtgtctctccttctgtcaaagcgaaggcagcagcaaaaggcttaacgacaatcgacgcaacctgcccagatgtacttcatacctataatttaattttagaaaaacaagcggctggctatgaaattatttatataggaaaaaaaggacatcctgaaccagaaggcgcatacggaacagcgcctgatgttgttcacctagtagaaacaaaagcagacattgatgctctttcattactttccgataacatttttgtgacgaaccaaacaacgatgagcaaatgggatgtcgctgatttaatggattatataaaagaaaaattcccgaaagctattcaacatcaagaaatatgtatggccactcaagtgcggcaagaagcttgttcacagtagcaagacgcaaactgtggctacgatctccactgatttgctagtacgagcgatctctagtaagtcaataatcacgtgcgtcgtcttagcgccaacgttcctcatgtgatgaaacgcttgagcactaataggcagtacactgaatgtgtccgagtattatcggaagttagatatatgagtggatcaaagacgcaaaaaaagtatcagttacagccggagcaagtacgccaacacaacttgttcgtgaagtgctattgtgtctggagcagcttgatgcggcagataaaactacttggaaacgtgcacctaataaggactttgagcgtattcttcccaaaatgaagaataattacatggctgaaaaaagacatcaacggctagctcacttaaaaaatggcggaagctaaaaaccgagcaactcctttattattgaagggacgcgactcagatctctctatcaacacaatctggaatggatctagatgtacttctgacacaataaatactggttcctgatccataatgcaagattggggctcggtcctccattttgattttcaaganagcctttcatcacttttatcatgttatggccagcatcaatagttggaagataatagctaataaatcatgtcccgtgtgataataacatcaccggt

SEQ ID NO: 3741 - DNA, 4755 bp, Listeria monocytogenes 4b
  misc_feature (1)..(end): n can be any nucleotide: a,g,c or t/u
cgctagcggccaccagtgtgctggaaaggtatataagatactgtatatcagaacgaaacaatttgcaattttttaggggggaacgatgtggatatgaaaaaagtaaatcctaatttgacacttttggcgctagcgattagtgcgtttgggattggttcaacagaatttattagtgtgggactgcttccgctgatttcttctagtatgggtgtgtcgattagtacggctggtttaactgtatcgatttatgcgcttggtgtgatggttggagcgccggttttaacaactatgacggcgaagatgaatcgtaaaaatttgttattattagtcatgctcgtgtttctgatagggaatcttgtctcggcatttgctgtgagttttggaatgctccttactgggcgtgttgttgcggcgtttgcgcatggggtgtttatgtcgattgcttctgttatcgctgccgatgtggttcatccgagcaaacgagctagtgcgattgcggtgatgtttacagggttgacggtggcgactgtgacaggggtgccgcttgggacgtttatcgggcaactatttggttggcggatgtcattcctgtttattgttgcgattggcgtgattgcgattattgctaattttttcctcgttccgaaaaacttatccaatggaaaaagtatttcatttaaagcgattggacaattattagttaataaaaaaatcgtgatggtgttactcatgacagcgtttggctatggtggtacttttgtggtttatacgtatttgtcgccgatgtttagcggaatgggctattctacaagcatgattgttattttacttattgtgtatggtgtgatggttgcgattgggaatacgattggtgggcatttttcgaatgagcgcccggctaaggcactgttcgtgatgtttagtttgcaagggattacgttattattacttcaatttacatcgaccaacgcgatttttggattaatgactattatgttgatgggattttttgcctttatgaatgtgtctggtttgcagttatatgtcgtgcaattggcagagcggtatttgccaaaaacggtgagcatggcttcggcgcttaatatttcagcttttaatgttgggatagcagtaggtgcatttattggcggattagttacggaatatattggtttgggttataccccgattgttggatttttaatggttttcatcgcaattattttaactttctatatgaaaaaagataaatagttcaaataataggccttttacagtgaatgtagaaggctttttttgtgctttcagtagctccgacctattccggcaaggtttttttccagttatagtaaaatggatagtttttttgtccctacgtatctgacaaaaatagctatatagcttattgtaagccctatcatgaaaatgataaattgaatttagaaagaggagtgatacctgatgaaactaaatcagcagtgtattcaaattttagattttcttatggagcaggaagattttaaaaatattggttatatttctaacgcgcttggttgttcggagcgaagtgttcgttatagtttggaaaaaatcgatatttttctccatgagcaaacattaccagctcttatcagacatacaaggaaaggggtgctacttccggaaaagaatatcgtaaatccggttgtgcgtaaatttaagcaacaaattacgccgaaaaaatatcgttacagccaagaagaagtgcagcaatttttactgctaaaactgcttttaagtgaagaagtgctcccggttacttattttgaagaagtcctgtttatttccagatcctctgtgctaaatcatctacgtgctattgaaggagaactttttttaaataatttagatttatcgcatcagcctaggcatggctttctagtgactggaaatttaattacgaaaacatcgctttttgctagaagtttcttgcgttttattaatatccgcgaattttatcagtttttagattcggaaaatagcttatctaaaaaaggcgagttatttttttataatctttttgaactggagattttgcaggaggtgaatcgtgaggcgcattcggtggaggagaatatgacacgtgcgatggatgagcagctttacttaacgctaattgcgattttactaaagcagcatgaagccaaaccggattttcagtttacagcagattttatgattaaagatgagcttgatcaggcgttagcaacaattattgggtctttgaagcagtatcaatatgggcgtgaagatgaggcggtaattgaagcatttgtaacaggtatttgcgaaaaaatgggtgaaatttatcaagtggattttgtgcatggcgatacggattttttcacgcaaatcaaagcacacattaaattaatgattaggcgtgttcgcgccggagtcactatcgagaatccgatttttaatgaatttatgcgcgataatcgagaaatttttatgcgtgtgaaggagagtttggatgcactcaagccgttattgccgatttctgtcagctctcaagaaatttcatttttagctatttattttgcatctgaggtacaacgcaataaacaaacagttgaaatgaagccgaatttgctgattatttgcccggaaggtgtcgctgtttcaaaaatgattgcgattcagttaaagcgtatgtttgagtttgaatcgattcaaacaattggcctcagaaagttcaaacgcgcgatgatggctgattttgattttgtgattagcacagtggatttaccagatatgcaagacgcaaaagtactccggattcatagctatttgcaaaaagaggatatggaattactgcaaaagcatttacggatgaaactcatcaaaagtgataaacagattattaataagttcagtaagattttagcgattattggcgaaaacacgcaaattactaatttaagtaaattagaattcgatttattggaagcgcttatatcggatgaaggtgaaacaccaaaaaggcttataccaccgtttcaatttacagaagaagcgattgttatggaagaaacatgcccaacatggaggcaggcaattaagcttggaacaaaatgtttggagcatttagaagtcattgagccgagttatcatgaaaaaatcatccataacttaaaagcatacgggccgtatatggtcgttgcgccaggtgttgtcattgcacatgcgggggcaagtgacggtgttttgatggatggcattggagtgacgattattgaggatggcatcatgtttttcgatagatacgaggagccggttcatgtcattttcaccttagctttaaaaacaaaagaggcgcacttgatcgtggaacaattaatgaagttagcgctggacgaggaaaaaatgcataaaattaaaatggctagctcaaaacgtgatatttatcattacgttaagtcggctatctttgaatgagagagggtttcataatggacatagaaaaaatatcgttttcattaatttcactggcgggggattcgttttctaaattaattgaagccttacatgccgcaaaagaatcagattcagaattagtagaacaacttttaaaagaagcagatgacctaatgattgaagcgcacaaagtacaaacggaaatgctgattcaagaaacaagaggggaacaagcaaatttttccgttttactcgtacatgcgcaagatactttaatgaataccatcttagcatcgactttaattcgagaaatgattgaaatgcatcaagagattaaaacattaagaaaagaggaggaaaagtaaatggaaatcaatcaattacatgtacttttagtgtgtaacttaggcgcatctacaggggtaatggttacaaaaatgaaggaaatcgcccaaaacagtgaaaagctcacgaatacagatgtgaaaattgaggcgcatccagcaggagaattacgcgagcatattgaagactttgacgttattttagtcggtcctcaaatcaaacatcaacttaaacatttaagtgaaattgcggcggaatataataaaccaattcaagtcatcgatacgaaagattacggcactgttaatggcgcaaacattttaaaagacgcaattattcttaaactgaacaaataaaaaagtggagggaaacaacatgtcgagtaaaaacaaacaatcttttatgaaccgttttattgcttttatggagaaatattttgaacctgtcgcagctagaattgaaaaacaacgtcatatttactcaataaaaaatgggatgattgctttgatctccggtctaattattggatcatgtccggtgattatgtggaccagtcctaaatatgtgctcagtttgtcctgtcgccaaagaatcttctgtccaccctgccctcttcccttatttttactgttttccctcccgctttcgattgcctgttgtccgttcctccttccctggtcgttccgtcggcgctctttatcgtttccccggcctcctgcttcgtttccctttttcttgttgtctgttttcgcggtgaattgttttttttcttctcttgttctctttcgtatttttgtttctcttctcttcctccgccccttctccctcttctcggtttcttttctccgacctttgctcactgcccgtgcctcgcccatccattccgttattctctctttacgccttaaccctcccgtttttcctcctcttctctctctctgtgtccctttt

SEQ ID NO: 3742 - DNA, 4340 bp, Listeria monocytogenes 4b
  misc_feature (1)..(end): n can be any nucleotide: a,g,c or t/u
tatatgggacattctcattggtattttgtagtaatgcaatattatttgtatcgtgagtatccgcaagtgcagcaataggtgtaagtgctatttgactagctagagaacttaaaactataaggctagcgatagtttttttcttattaaacattatttaaataacctctttccttgaattggaatttaatgtaattaaagtatagcactcgattttggggcgttagtttaattctagtagcattaatatggtatattttgtcgaaataatgactaatgagaatcataaaaaggtaaatcgttaatttaaactttaacagttagcgctattaagtacttttactcagaaaacctctaccatcttcttgttatttcagctataatgaagtaattgaaaactaaattaaaggattaacaaggaggaaaacgatttgaacattatgattgcgctgattcctgcattactctggggaacagtaccgctaattattacaaaatttggcggttcaacaagacaacaaacgatgggaatgacactaggggcactcacttttgcggtaatcgttttcttctttactgacccagtttatacgcttaaaacagtaggaattagttttataacagggtgtttatggactgtgggtcaaatgttccaactgcaagcattcaaaattatcgaagagcaaaaagcattgccactgggtaccgggatgcaagaacaacaatcagcactgtgaggggatatcataaatgatgaacgagactcgacactatggaaggttttatggcacatggacctagcgctaatgggaggcgggatacattcaacactctatgctaaaaaaaaggaacatggaccttacgccttggaacaaggacaaatcacattattcatatctgcttgtggttatgttggcttagtcgttctaattcaaggtttcaaaatcgatggaattaacgcgatcttgccgcaagcggttgggatggttttaagtgcgctaattatgacgcatagcggtggtacggaaaaacgtttcaataaacgaacactcttacttactattccagggataatctgggcggctgggaacgttgcgatggttcacgctaaccaacttgttggcgttgcgactggtttttcactttcgcaactcggagttgttatctcaactattggcggaatcgtacttttaaaagaaaagaaaacacaaaaagaaatgttttttgttattgtgggcgtagttttagtcgttctcggcgggattttaatcggcgttgcaaaaggtgcttaattaattatttcgtttagcgcgaaaaatgatataatgatactaattgttttatttttaaggagggaattgtgttgcctgaagagaaaaatacgttttatattaccacaccaatctattatccaagcggaaaagcgcatatcggccatgcttatacgactgttgcgggggacgcgatggctcgttataaacgcttaaaaggatatgatgtgttttacttaactggaacagatgagcacggtcaaaaaatccaagcaaaagcgaaagaacgcggaatttctgaacaagaatacgtggatgaaatcgcagaaggtttccaagaactttggaaaaaactagaaatttctaatacggattttattcgtacaacacaagaccgtcataaaacatcggttgaaaaaatctttgaacaacttttagaacaaggcgacatttacttaggtgaatacgaaggttggtactctgtttctgatgaagaatactttacagaaacacagttagaagaagtatataaagatgaaaatggtaaagtaatcggcggaaaagccccaagtggcaatgaagtcgaactagtgaaagaagaatcctacttcttccgtatgagcaaatatgcggaccgtttagtagaatattataattcccatccagaatttatccttcctgaatctagaaaaaatgaaatgattaataatttcatcaaacctggtttggaagatttagctgtatctagaacaacttttgattggggtattaaagttcctggcaatccaaaacacgttgtttatgtatggattgacgcgctttctaactatattactgcgcttgggtataatacggacaatgacacgaaattccaaaaatactggcctgctgatgtacaaatcgttgggaaagaaatcgttcgtttccacacgatttattggccaattatgctgatggcactagacttaccacttccaaaaatggtgttcggccacggctggattctaatgaaagatggtaaaatgtctaaatccaaagggaatgtagtagatccttatatgctgattgaccgctacggcctagatgcgcttcgttattacttattacgcgaagttccatttggttcagatggtttatttacaccggaagactttgttgatcgtgtgaactttgatcttgccaacgatttaggaaacttacttaatcgtacagtagcaatgattaataagtactttgatggcgaaattccggcttatcaaggcaatgtaacagaattcgatcaaaccttagtggatttcaaaaacaatgtggtgaaggaatatgaaggtagcatggatcacatgcaattctctgtagctttaaaccaactgtggtcactaatttctcgtacaaataaatatatcgatgaaaccgctccatggacacttgccaaagacgaagataaacgcacagaacttgcgagcgtaatgactcatttagcagaaaacttacgtattatcgcagtacttttgcaaccattcttaacaagaactccaggcgaaatcttcttacaactaggtttacaagaagaaaacttgaaaaaatgggatagcatctatggatacggtgaaattccagctggcacaacagtggtgaaaaaaggtacgccaattttcccaagacttgaggcagaagtagaagttacttatatccaagatgaaatgaaaggctctgcgccagctcctgccaaagaagcggcggaagttgaagcgcttgaaacaccgcaaatcggcattgaagatttcgataaaatcgatcttcgtgttgcagaagtaaaacaagtagataaagtgaaaaaagcagataaacttctttgtttccaattagacttaggggaaggaaaactgcgccaagtgctttcaggcattgcagaattctatcaaccagaagaactaatcggcaaaaaagttatcgtcgtttctaacttaaaacctgtaaaacttcgcggactaatgagtgaaggaatgatactctcaggcgaaaaagatggtaagctaagtgtaatcgaagcaagtagcgcacttccaaatggtgcaaaagtaaaatagtaaaaacgagtcctaattcatttgagttagggctcctttttttcgcctaaaaaaactttaaaaaaaagattgcatattgcaaacgattacaatataatgtaactatacttacttaattcattgaacgaagtaagtggtcggacagaagtaaaggagcttgaaaatggatatcttaagaaaagggaataaagacttaattaaagacataaaccgctacaccgtgctgaatttaatccgtgaaaaaggagaaatcacgcggactgagatagccaaaaaatgcgattttgggatgtctacattaacgtatattttagatgatttacagcaagaaggcattattttggaaggtgccgaaacatcatctactggaggcagacgtgccaagttagttagatttaataaagattatggatttgttgttagtgtcaaagttgaagaggaacaacttctttttgcgttgaccgatttaaatgcagaaatcatggaaaatacttctataccattttcctcagagaaaaaaccagaagaagcgattgagttaattgctaaaaatgtgaaaaagatgtgtgaaaacagagatatgaaccatttgctaggagttggaattgcgatttccggcctagttaatcgtagaaaaggaacagttatccgctctactatgttagggtgggaaaatgtcgctttagaagcaatgctacatgcttacttcccagatattccagtgtacgtagataaaaatataaactgctacacactcgcggaactatggttaggtgaaggaaaacaatcaaataattttgcaacagtttccgttggagctggacttggtttatccgttgttattaatcgtcaaatttattatggtgcacagggtggagccggtgaatttggacatacaacgattcaaccgggcggatacaaatgtcactgtggtcaaaaaggatgcttagaaatgtacgcatccgaattttatttccgaaatcgt

SEQ ID NO: 3743 - DNA, 3780 bp, Listeria monocytogenes 4b
  misc_feature (1)..(end): n can be any nucleotide: a,g,c or t/u
attattaattatagcgacaactccgtcaagttacaaaatgatattagagaactcttagtcgattattctcgcgcaagtagcaatttaatcgaagtaagaattgtagatgacaaaggaaaaattctcggcacatctaatttaaataaccaaggaattgttggacaaaaaagcaacgatccacttgtaaaacgaacattatcacttggaacgacttctgaggacaaaatctataaagacgaatcgaataaaaataaccgcgtttgggtgaacgtatcctccatcaaaaataaaggccaagtgataggggctatttatcttgtcgccgatatcgaaagtgtctataaacaagttgatgatattacaaacattttcatcacagggactttgattgcgatgattattacagccgtccttggaattctattatcaagaaccattactaaaccaattatcgaaatgaaacgtcaagcttatgcgatggctcgcggcaactatagccgcaaagttaaagtatacggtgtcgatgaaattggtgaactggctgattcttttaatacactaacaaaacgagtccaagaagcccaagcaatgactgaaggggagcggcgcaagttatcctctgtactcgcatatatgactgatggcgtaattgcaacagaccgccgcgggaaagtaattctcattaatacgccagcagaaaaaatgcttcgcgtgaaacatgaaagtgcgaatgggcgctcgattattgatgttttagacatcggagacacgtaccaatttgaagatttaatggaagtagatgggtcactaacaatggaccgtagtactctcgacaaaccatacgtgcttcgtgccaatttctcggtcattcaaagggaaacaggctttaataatggggttatcgcggtacttcacgatattaccgatcaagaaaaagtcgaccaagaacgtcgcgatttcgtatccaatgtatcacatgaactaagaaccccacttaccagtatgcatagctatttagaagcattaagcgacggcgcgtgggaagataaagaaatcgctccacgtttccttgaagtaacgcaaaatgagaccgaacgaatgattcgtctcgttaacgatctcctcaaactttccagaatggatggcggcagagaacaactcgaaaaaagcttcgtgaactttacggatttctttaaccatattattgaccgttttgaaatgatgaaaaaagaaacaatcatgttcaaacgccatattccaagagagccagtcatcatcgaaattgatgaagataaagtaatgcaagtgcttgataatattatttctaacgccaataaatattcaccggatggtggccgcatttccttctatctgaaaaaatttgaagatgaaattgaagtaagcattgccgatgaaggtttaggcgtaccagacgaggatttagcaaatgtgttcgaccgattcttccgtgtagacaaagcacgctcgcgagaaatgggaggaacagggttaggactcgctattgctcgagaagttatcgaagcacatggtggtcgaatttgggccgaacgtaataaaaccaaaggaaccataattaaatttaccctgccatacagtgacttaccggaggatgattgggaatgatgaaaaaaacaggatttcgctcatttatactaaccattttagtcgtactcagtattgtcctaagctactttatttggaagggacaacctgattacgaagcaattaacgtaaaagaagtggaaaaaacaaccattgacaagacaatgacaacatcgcaagtattcaaaccatacaagctggctgtaaatgcaaatgaaaataattaccaaagtttagatgctgatttattaaacgaactaatggcacaaggtaaagcctttagtttctcggaagtagtattagctagtaaaaaaagtagtgaagactatgagaaattaatccataaaaacggaactatcgagattattttccccaataatattccgttctctatctttgctcaaatttttcaagtagaaggggaagggcttgagtcagcgttctttaatcgaattgtttttgatattaacaaaacggatactgggctacattcggtttatttcacaaatgacgatcaagaaaatatttaccaaagttctttgcaaaataaagacattgataaaatcgaaaaaattgttaaaaagaacgaaagcaagctgactcaaaatgataagctaatttcaaacaaacgcaatctttttctaagctctgaaaaaacgaaactaaatcgcaaaaaatatatcatcgattcgcttgaaattaatttattcacgtccgcactattccaagattctggtactgttaaaagtgaaggaaacacatacacagatggttcaagtgtcattgaaatggatacagataataaagtattagagtatgtaaatccatcacaagaacgtactaatccagaagatctcagtagtgtcaaacgagctggacttattcaagatagttttaactttgtgaacgaccatgctggctggactggcgacggcgcttactatttcacaggttatgccgcggaaagtgcgacgactaatttcagtttattcattgataatttacaagtatacaatgagaatggcatggcggatatttctgtaacagaaggacttgaagctgtttataaatacatgagaccatttttccgcttagatacagatgttcccggagagaaaaaagaagttacgttaccatcctcttattctgtctatagtgctcttgcccaaaatcctaacgtcaaagcagaagaaattgaagatattgttcctggctatcatatgactagaagcgaatcttcgggcatgaatcgtcttgtaacattagagccgacgtggttgtataagtatcatgacaaatggttcatcttccaaccagacgcagaaaaggcgggtgaataaaaatggattggcgtaaaacacaaatgatttttattgtgactctcctcattcttaatgtttttttagcggtaatatttttcaacaagcagttatcagatgacccagatacactcggaaatgaaacgctagaagaacgattaaaagcagataatatctctcatcctgatttatcgaccaaacctactagcggctctattttcactacagagcgagcagcttttacaacaaaagatgtgagcgatcttacagggcaagccattacgcttaaagataacaataaacaaatctattctgtcttacaaactcccgtaaaagctggcaaaaaaggtagtaacccagaatttcaaaaatttatggaatcagatgtttatcgcggggaatcctatcaattttggaattatgacaaagatgctcggaccctcacttttaatcaattaattaataataatatggttttatttgatgaagcgggccaaattactttttatttagatcaagatgaccgagtgatctcatacgagcaaacttggatgtctaagcaagatgatttaaaagataaaaccaatttaatgtccgcaacagatgcattagaagcggtttatcagcacggagaattgaagcaagacagcgacgtggtttctgcaacatttggctattacacgacagtacagctaccctctggaaatgtatacttccccgtttggtgttttgaagtaaaacattctggtgaaactaattatgtcctcgtaaatgccaaagacgaacaagtaattaatcaatcagacaacaaatcagccaccgagccaggtacagaatt

SEQ ID NO: 3744 - DNA, 5296 bp, Listeria monocytogenes 4b
  misc_feature (1)..(end): n can be any nucleotide: a,g,c or t/u
gaagatgtttcacttgtcccttatttggcggacttatatgaggctggattgaaaacatggaaactagatggtgttcttgcagaatcagagaattttgttcaaatcgcatcgctgttagttgaagcgaaagaagctgttatgaaagggcaatttgtcgcagagtattttgtgaataaattaacggaacttcagcctccaacacgaaaactagacgcaggattttatttgaaaaatccggatgatgtgaaatagggggaatagcataaatgagtaaaatattaaaaaaaccagaagtgctagctccggctggcaacttagaaaaattaaaaattgccattcgctatggtgcggatgctgtatatattggtggtcaggcttttggtcttcggtcacgagcaggtaattttagctttgaagaaatgaaagaaggtatcgcttttgcgcatgaacgaaatgcaaaagtgtacgttgcggcaaatatggttgcgcatgctggtgatacagaaggtgctggggaatttttccgaacattacgcgatattggtattgatgcagtgattgtatcggatccagcgctcattagcatttgttttcaagatgcgccagggttaccagtccacttatctacacaagcctcggcaacaaactataagacattagaattttggaagaagcaaggtcttgaacgagttgtacttgctcgtgaagttagcatgcaagaaattcaagaaatcggcgaaaaaacggatgtcgaaatggaagcatttatccatggggcaatgtgtatttcttattctggtcgttgtactttatcaaatcatatggctaatcgtgatgcgaaccgtggcgggtgtgcgcaaagttgtcgctggaaatatgacttgtttgaaattgataatggtgtctcgaaaaatttagtggatactgatgaagaaccgttttcaatgagcgcggttgatttatcaatgattaaatacattccggatatggtaaatgctggtgtggatagtttgaaaatcgaaggacgaatgaagtccattcattatgtttcgactgtcgcaagtgtataccgtcgtgccgtagatgcttactgcgcggacccggaaaattatgtattcgatccagcttgggaagaagaattatggaaagttgcacaacgcgaactatctacaggatttttctataaagaaccaaccgaggacgaacaactatttgggaaaacgcggaaaattcctcaatatgcttttgcggcgcaagtattggaatatgacgagaaaacgaaaatcgctactttacagcaacgaaataattttggtgttggagaagaaattgaattttacgggccaggagatactggatttaagcagattgtagaagtactttggaatgaagatggtgtagaaattgaccgtgctccaaatgcaatgatgaccattaaaatgccggtagataaacctgtgaagccattttactttatgcggaagaaaaaataaaaatctcatgttgcagtaggattgtcgtgtactccctaagtaaggtataatggggtaagtacatatgaaggaggagattaattatgataggatggattattgctatcgctgttgttgttattttagtattgatttattttggtctatacaacagccttgtaaaataccgtaaccgtgtggatgaaacttgggcgcaaattgacgtacaattaaaacgtagatttgatttaattcctaatttagttgaaacagttaaagggtatgcaaaacatgaaaaagaaacattaacacaagtaattgaagctcgtaataaaatgatggaagttcctgctgacaatcgtcaaggtcaaatcgaagcggacaatatgttaagtggagcgcttaaatccatttttgcattaggagaagcttacccagatttaaaagcaaatacttctttcatcgaattgcaacatgaattaactactacggaaaataaagtggcttattctcgccaactttataatacaaccgtaatgacttacaacacaaaagtacaatctgtaccaacaaacatcgttgcaaaactgcataactttacagaacgtgacatgctttctattcctgaagtagaacgcgttgcaccaaaagtagagttttaagccatgaaggagagcgaaaattatgctatttgaacaaattgcagcaaataagcgaaaaacaatttttattattcttggctttttcattttcgttcttatggttggcgctgctataggtataattgtttggaataactatctgaatgggctcatactcgcggcagtgattggtgcattttatattttgattatggtaatgagcagttcatctgttgtcatggcgatgaaccatgcgaaagaagttacatccaaagatcaagcgccagttttgtgggatacagtagagagtatggcaatggttgctggtattccgatgccaaaagtatatatcgttgaagatgcaagtccgaacgcatttgcgacggggatttctcctgaaaaaggagccgtggcggttactagaggattgcttaataaattagaacgttatgaacttgagggcgttattgcgcatgaaatttctcatattcgtaattatgatattcgattatcaacgattgccattgcgctagtagctgttattgcgattcttagtgatttagctatgcgaatgattttctggggaagcctaactggtggcagaaataatcgtaagagtgacaataataacagtggcggggcacaagcgattatctatatcgttgcactcatatttgttattttggcgcctattattgcaacagctatccaatttgctttatctcgtaatagagagtatttagctgatgctagtgcggtagaattaaccagaaatcctgatggacttatccaagctttacaaaaaatcagcggagattcgaaaaaaatggaagaagttagtgcttctagtgagtccatttactttgcgtcacctctaaagtctaaaaaaaataagccaggtctttttgactctcatccgccaattagttcgcggattgaacgcttagaaaatatgtaaaaaaaaagaagcaacccaggaatgggggtgcttcttttttataagtttccgatgtatttccagtgagcctggccatctggagcatcgattaattctactttttgttggagacgccattttttcatttgacgctcgatttgttgttcagaaacaccataaaaatctgccatagtagcggaagaagtaacttttacttttgccaagtattcttccatttgcgggcgttcttctggttgtggggcatcatttaaaagctcggataaaacatgcacataaacttcataacgatgaagcccacttagttttaatccagcatcttctatatttttattgaaaaagactacggtaggattttcatgaatttccatttcttgagctactttttgatcgccaatataagcacgcttggcaactgtagaagctagatcttttttgaattctgataaatctagaccggtggaaacggcgatatcataaagtacttcttcgctagcgatatctttattttcaaggaagtaggctgcttgtattttgcgcaagaatgtaattccttgtttttttccttgtagttcagcggctttgactgcaagacaagaaatataggaaaggtgcgcccctatttgttgttcttttaagcttaggttactatttcctgcgcgcttttgtttacatacaaatgtctgcaaattattatgcagaacatagcgcaatttgaaatagttcccgtactccatttgtaatcggagcatattcgcttcaatattccaacagtcatcacaagctggatcaaaaaatagataaatttcgattggcttggaatttgctactgactgataatataaattttggttaatcatttgctatcacctgattttcaaattctaaatatcttcaaacagatactcatttcaatgtaccagtgtgaaaagaaataattcactgctcagtaaaagctgatacaaaatttgtttttgtaacttacatatctattttatcagcgtaatgtaaatttaacaaataattgtcattggcttaacatatttattcgttattttttaagaatttgtgtctttttgctataaaagtatctattcttacttattattttcatatacgtgatgataaaatcgtgctactttattttcggcaggttgattggtgatttgatattctttaagtagtttgtcaaaaacctcttttcctttatcataatcagacacttcatactctaagtcgaaatctgatatagaaccataaaaattcttatcaaacacaagtaagccttttttataatctttttctgcgcgaattgttttgagtgaaccgaaaacctgtaagtcttcatgattgattcctagttcttttaacgtgtcacgaactggtccaactggaatatttgctccagagatgatggcacttgcttggtcctcgccaagaatttgagtagtttccatcagtccacgtgcttctggggttttgagtgttaattggtactgtgtgtctaattgtggaattcgaagagcggaatgacgttcttttaacccgaaatttgctgtgtctaaataataatttgtttgctcaaagaaatcttcttctttcactcgaaaactttctattaatgtatcgtattcttctttggttagtaggttacgaaattcgatttctagttctttgaccatgatagttcagctccctttaatgaaatgtcgcatctaaatcttgcgcataaaattgaattgctttcttgtaacttaaaatgtcttcatcactcgttgtttgtgtcaagagtattaaggcttcctgcaaagcttctttttctaagccttgattgtatttagccataactgaaaaagtgcgcaaggcattattatctggaaattcttgtaaagcggtttggaaaagcaggctagctttttcgggctgacctgtaatacggtaagtactaccaaggcctatatatgcttctttacgagaatcaactggaagaccgagctgtatggctttctcataaaaggggattgcagcatcttctttaccgagtgcgtcatgggcccatgctgcataataatgaagttctgcgttatcggagttgttttttaattcagcaagtgcttgagtgcgcgcagtttcgtaatcgccgttttgaagtaatgttagaatcattttcatcctccttttagttgtcgtttgaatgcttcggttttattttaccacgggattgaaaa

SEQ ID NO: 3745 - DNA, 4353 bp, Listeria monocytogenes 4b
  misc_feature (1)..(end): n can be any nucleotide: a,g,c or t/u
acggccgaactgtgctggaaagtgctatttcttggttcggttatgttgtttggtttaagtcgcttcatggagccggatggcatgtcagaattagtggcggttcattcatggaaactgtggctcttgtttgttgtttcagctgtagttgcaacggcatttggcaatttcgtttataattatgcggttgggaaaattgggccgtcacgctcggctatttttatgaatttcaatccattattttcactaattggcgcattacttttccttggagaagcaattaaaatcccccagctagttggcttcggttttattattattggcgtcctacttggttcgggcgcattaatggatcttatttatgaacgcaaaaaaacaaaagtacgcgatcctgaaaaactgctcgaaaaagaagtttgacttttgttgacctttatattataatttggttagttacttattaaaagtaactagataatgataggagggatagcatgaaattgttattaaaaaatattaatgaacttgctgcaaaacaaaaaagtgaaggattaactgcttttgaaaaagaaagacaagctgcccttcgtcaagaatatttgaaaaaaattcgaggaactgttcaagataacttacatcacgtaacaatcattgatccacttggagacgacgtaactcctaaaaaactaaaagaaatccaagccgaattaagaggctgatataagtcatagaaggttgaaagagctcattgctttttcagcctttttttgttgatagagctaatttaccatcttgcggattcgagtagagaaaaatggtgacgaacagttctaacagtttgaggaaggccggtgctacaatcaaggtgagaaaggagaggataacatggaaattgcaattgcagctgaccatggcggttttcagctgaaagaaaaaatccgcgcgcatttaattgaaagcggctacacagtaaaagattttggttgttattcattagaaagcgtggattttccagagtatgccgctaaagtaggacactttgttgcaaccgaaaacagtttaggtgtgctctgttgcggaacagggattggaatgtctatggcagccaacaaaataaaaggtgttcgtgctgctgttgtttcagatgctttttcagcaatgatgacgaggcgacataataatagtaatgttctttgtcttggtgaacgtgttctgggcgatagtctggcgttactcttacttgatacgtggcttgcggcagaatttgaaggtggaagacataatacaaggctcgcgaaattggcggagcttgaggaaccggaggaagataaatgaaaatgattgcggcttccattatgtgtgcagactcgcttcatctcgctgacgaacttcgcgcactcgaacaagcaaatgtaaaaatgctccattgtgatgtgatggatggtgtttttgtggaaaatgcagcaatgggcgcctatgtccttcaagatataaaaaacaatacagatatgctactagatatccacttagctacagtgaaccctgataaatttgtggatttgtatgcggcgataaagccggcttatatgtctttccacgtagaagcttcacctgatgtcgatgcgactataaagcatattcgtgcgctaggaatcaaaccgtccatcgccatcagcccggatacagagattgaacagatttatccatttttagataaagtcgatatggttttaatgatgaccgttaacccaggattcgccggacaaaaatttcagcatcatgtcctagaaaaaatcaagaaacttcaaagagagcttgaaagtcacaccaataaaccattaattgaagtagacggtaatatttttgaagaaacagttcggttgcttgaaccaattggcgcagatgtctatgtcgttggaacagccgcattatttaacgacaaggcaggtagttatacagaaaaattggcgccactcagagaaattatccaagaaaggtgagggaaaatgcatttagattcagctaatttagaagacgtgaaaaaaattcaagccagctccatttttaaaggaattacaacgaacccaaccattttagtaaaagaaaaatgcaatcgacaaacagcgattaatcgtattttagaacttacggataaacaagtttttgtacaaacagttggttttagctatgaggaaattttggcagatgcgcgcatgttactagctacgtttgggaaagaaaaaatagctattaagattccggcacatgaggctggtattaacgtgatcgatacactcaaaaaagaggataaaaccattcaaatcttagggactgctatttattcggctgatcaagcaatcgcggttgccttggctggtgcagattttgttgccccatatgtgaataggatgagcgcagcgaacatcgatccttttaaagaaattgctgggatgcgtcacttttttgataaaaaggcacttaaaacacaaattatggcagcgagctttaaacatagcgggcaagtaatgcaagcttatgaaagtggagcagatacggtaactattccttatgaaatttattcgcaaatgaccaacaaagttttagcagtagaagcaattcgtgtctttaacgaagatgctacattgtacgaaaagtaacaatctccttctcatgttgtggaagtgtgtggagaaaacttgtgatgaaagcgcattcttaagcgccaaaccctatgctataattaggctatcaaaggggggagacgcatgtatctggataacagaagtaaaacactatttcaagaagttataaaaaatccgaacattacaaataaacaactcgaagtaaagtataaattatcgcgttaccaaatcagctatagttttcagaaagtaaacgaatggctcaagtggaaaaattatccagaagtaaagcgttccaaaaacggccgatttatattagaacccgagcttacagcgctattttctgagaaagaaactcgagatccgagcgtagaatacttaccttctgaaaatgaacgtgccaatttaattttgctaatgcttttaacagccaaagaagaactatccctcgcccattttacaacgaagattcaagtaagcaaaaacaccattcttcgtgatttaaaagtagcgcaaaaattacttcctaaagaaacaactgtcacttatagtagagcatcgggttatcagttagcagggagtgaatgggaacttcgcaaggttctgacacaagttgtaagtagtgtgaaagagatgttccgaggagagcactatttcctatcgtattcaggaattgaaaaagtccaactaatggaaattcgccgcacactcgaagaagcagaagcgatgatgcaaataaaattcacctatgagcaaatcgaattattaccctatttgctatccgtgatgttcttaagaatcagagaccggcgcttaatcgacactgcttttcatattgacgagaaatcactttcagacacgcgagaataccacatcaccgatattttgctcgaaaaaactggcccagttccagaacaagagcgacttttcatcacattacaacttcttacaacaaacattttttccggcgaaattttaactgaaaaattaacagaagacttggaaaaagttgtcctcacatgcttagacttattcgagaaaaaagcacttgtttctcttaaaaacaaacatatcttaatcgaaaaattactcttacatttaaaaccagcctattaccggattaaataccaaatgaatttagaagatacgctttatgaaaaattcaaccaagaattcgaagcgttaaacttcattgtgaaagaagcatttgacccacttgcgaaatttattggtcgcgaaattccagccggcgaaattttcttcatttctttgtttattgggagcgacatgataccgcaaaacgatatttatcataaacaaaaacgtgcgattgtgctttgtccgagcggggttactttttcaaaaatcatggaaaatattttagtgaaactattcccggaaatccatttttatccaactatatctgttcgggaatatgccttttttaaagcagaagttgatattgttttttcatccattccgttaaaagatggcgaaaatgtctttgttgttcagccatttatgaatgatatcgaaaaaacgcaactgcggcaacacgtcttgcaaaatttatttggaatgggaaaccagctcacgagtattgataaaatcatggaagtagtggaaccgtaacgccgatataaaggatccgaatgcaatacgagatggaattattgatattttgtcggctcacacagctacagatgaaaataaa

SEQ ID NO: 3746 - DNA, 4716 bp, Listeria monocytogenes 4b
  misc_feature (1)..(end): n can be any nucleotide: a,g,c or t/u
aagtctaataccacgaacaccagcagctgtacggcccattacgcgaatattttcttctgggaagtagatagattgtccatgtttcgttgcgataatcatgtttttgctaccatctgtcatctgaacagagattagttcatcgttttcgcgaagttcaactgcacgaagaccactttgacgaattttcgcaaattgagaaagggttgtacgcttcacgacaccgtgtttagtagtaaagaataggtagctatcatcagtgaattcggatagatttatcacggcattcacttgttcttggctttcgattccaagtaagttgatgattgggatacctttggcggtacgaccgtattcaggtacttcataacctttcgaacggtaaactttacctgtgttagtgaagaatagtaacgtatcatgcgtgctcgttgcaacaagatgttctacgaaatcatcttcatgagtagacataccttggataccacgaccaccacgacgttggctacgataagttgataatggtaaacgtttaatatagccacgtttagttagtgtaatcgccacttcttcttcagggattaagtcttcatcttcaaggcttactaaatcaccagccaagatttctgtacgacgtttatccgcgtatttaactttgatttcttctaattcttcacgaataatttcaagaatacgctcatcatcagctaaaatggcttttaaatcattaattaatgccactaagttttggtattcttcttcaattttttcgcgttccaaacctgttaaacgttgcaaacgcatgtctaaaatggcttgcgcttgtttgtccgaaaggttgaattgtgtcatcaagccttctttagcaacatcggaagtttttgatccacgaattaatttaataatcgcgtcaatattatctagtgcaattcgtaaaccttctaaaatgtgagcgcgcgcttctgctttacgaagctcaaattccgtacggcgacgaataactactttttgatgctctaaataatgataaagaatttcttttaaattaagtacttttggatgattgtcgacaagtgcgagcatattaataccaaaagtagtttgaagtgctgtcattttgaataaattattcacgataacacttgcactaatatcacgacgaacttcaataacaatgcgcattccagaacggtcagattcatcgtttagggaagtgataccgtcgattttcttctcacgagctagttcggcaatacgctcaactaggcgcgctttatttacttggtaaggaatttcggtaataacgattgtttctttaccatttttcttttcttcaatatcgacacgaccacgaacagtaatcgaaccacggccactttcgtaagcgcgacggattccgctacgccccataatcatcccagcagtagggaagtcagggccagggatatattccattaaatcacgaatagtaatatccggatcatgactaagcgctaaaacgccgtcgataacttcaccaagatggtgggtaggaatgtttgttgccataccaactgcgatacctgacgaaccattgacaagtaagttagggaaacgcgctggtaaaatgactggctcacgttcagaaccatcgtagttatcagcataatcaattgtatctttattaatatcgcgaagaagttccatcgaaatttttgacatacgtgcttctgtataacgcatcgctgccgccatatcgccatcaaccgaaccaaagttaccatgtccatcaactagcatattacggtaactaaaatcttgcgccatccgaaccattgtaaaataaaccgctgtatcgccgtgggggtgatacttaccgattacttcaccaacgatacgagctgattttttataggccttatcagaagtcatacctaagtcattcatcgcatatagaatacgacgatgaactggttttaatccgtcacgaacgtctggtagggcacgggcaacaattacactcatcgcatagtccaggaatgatgtccgcatttctttatttaagtttatctctgttattcgttgatttggtgtttctgccattgttagagaaacctccctttcaaaagtaaggctgaatctagttcaaaccttttaaaaacaattaataacccaattattacccgggaaatatttattaaacatccaagtttttaacgtattgcgcgttgtcttcgatgaatttacgacgaggttccacgcggtcacccatcaacatttcaaaagtttcatcggcatcaatagcgtctttgatattgacttgaagtagtgtacggtgttccggattcatggttgtatcccaaagttgttctgggttcatttctccaagacctttatatcgttgaatgctgtatttagtgtctccgtcaagggaagctagatagtcttctaactgtccgtcgctatatacatattctatttgtttaccgtgcttaatttgataaagcggtggttgtgcaatatagatataaccagcatcaagcagtgggcgcatataacgataaaatagcgtaagaagtagtgtacgaatatgtgcaccatcaacatcggcatcagtcataataattaatttgtggtaacgagatttagaaacatcgaaatctccaccaaaaccagttcccatagccgtaaaaatagttcgaatttcttcgttagctaaaattcggtctaaacgcgctttctccacgttcaaaattttaccacgaatcggcaaaatagcttggaatagacggtcacgaccttgtttagctgaaccaccagctgagtcaccctcaacgatgtaaagttcgctgatttcagggttacgggaagaacagtcagctagtttacctggcaagctagaaatttctaacccactgcttttacgagcaacttcacgcgcgcgcttagcagccagacgtgcacgagaagctacaacgcccttctcaacgatttttttagcaacatctgggttttccatcataaatttatttaaagcctcagaaaacagcttatccgtgattgaacgagcttctgaatttccaagttttgtttttgtttgtccttcaaactgtggatctgggtgtttgatggaaatgattgctgttaaaccttcacgaacatcttcaccggaaaggttatcatcactatctttgaacaatttattacgacgcgcgtagtcattaataacacgtgttaacgccgttttaaatccagattcgtgagtcccgccttcatacgtatgaatgttatttgcgaatgaaatgatattgcttgagaatccagtattatattgcatggaaatctcaaccataatgtcatcgcgttcaccttccaaataaattggtggctcatggataacgtcttttgctttatttaaatgctccacgtaagaacgaattccgccttcatagtggaaatctttacgaactttgtgttcttcgcgcttgtcttcaattgaaatcgttaaaccacgattcaagaaagcaagttcgcgcgtacgagtacgaagtgtatcaaaatcaaattccgttgtttctgtgaaaatttgtggatctggcgtaaagtgaacaattgttccacggtaatccgtttcgccttgttcttccatatccattactacatcaccacgttcaaagcgttggtaatatttttgaccttcacggtgaacgtatacctcaagagatgtggaaagggcattaactaccgatgcaccaactccgtgaagtccgccagatactttatatccgccgccgccaaatttaccaccagcatgtagaacggtaaagataacttctactgttggacgaccaattttttcgttaatcccagtaggaattccacgtccgttatcacgaacagtaatgctgttatcagcttcgattgtaatttcaatttctgtacaaaaaccagcaagtgcttcatcaattgcgttatcaacaatttcccataccaggtgatggagtccgcgttgactagttgaaccaatgtacataccaggtctttttcttactgcctctagaccttccagtacttgtatttgatcttcgttataatctgaagcattttcttgtacatttgtaatattttcttctgacattaattattccaccgcactttctttttcatcaaattatattaacctagattaggatttttttaccgtacctttttctacatagaaagttgttgcttgtttgagcgtttcatggtcgatcccgctcgtacttgttgtcgttacaaaggtttgtacttttccttcaatagctccgagcaaatgcgattgacgataatcatcgagttcactaagcacatcatcgagaagaagaaccggatattcgccagtttcttcatggattaggtcaatttctgctaattttatagaaagtgccgttgtccgttgctgaccttgcgaaccaaaatcttgcacattttgcccattaatataaaacagagaatcatcccgatgtggtccaataagcgtgacaccacggtcgatttctctttgtttgattgattccattttttggagcaaatctgctttccacacttcgggatcgtgcccatttagcgtgatggaagctttatactcaattttcagcgtctgaagtgctcgggaaatttggtgatgaattggcgccgaatatgcctgtagtttttgaatgaaatgagctggcgttttcgggaattaatggcgacatc

SEQ ID NO: 3747 - DNA, 3062 bp, Listeria monocytogenes 4b
  misc_feature (1)..(end): n can be any nucleotide: a,g,c or t/u
gagcttcacagaccttctaagctggttaaacggctatcaaaaacgttacggttttgtttatgttgaccgcgatgtggaagatgatgcgccaatgacacgtattccgaagaaaagttattattggtataaacaagtgattgaaactaatggagcagatttataaatgatggctgaccttcaagattggctagctagaatccaagcaaaaatcactgcgttaaaagaaaaagatcccgatttgaatttatttggttcagaaagccacgcctataaacttaatcaaccattgtctaatcaaacgcttaccgagtttgagaatgagcatcaaattaccttacctcaagattatcgcgcttttctagagcaaattggtaatggtggaatgggtccttattatggcttagaaacacttgcggacgggctttgcgcctcgcttgattacaaggatgaaaagtacggggtgcaaacattaagtgagccttttccacatacagatgattggaccgctcctggttataaagaaggaatgtccgatgaagattatgatgcttggcaagaactgtgcttccaagataaagaagtatttggacttctgcgtatcgctaattttggttgtggcgtttcgattaaccttgttgtaaacggtccttcttatggagaaatttgggtggatgacagaaataatgataatggcgtctatcctgatttttactttgggaatgaagaacgtttaggctttcttgaatggtatgagttatggttagataaatctatagaggaaattgaataaagaaaaaaccgctaaaaagaagcatactctttttagcggtttttttatgcaatgttcatatgtgatggctttttatttttaaataatttgcatgctatactccatttatattatagaaaaggagtaggatgacatgaaaaaatttattctagcaagccttgcatgtacgactttgattagttttagtcctttggtaggacaagtcgaagtaagcgctgctacaacaaacattgccactgccccagaaaaaaatttacaagaagctcctccagccacggttgatcaaattttcccagatgatgctctagcttttaaagtcgcacaggaactaggtgtttccgaggatacagtcgttacacaagaacaactagatactatcgaaacaatggtatatgtggatttcggtgtggaagatttaacaggcatggaatatttacacaacttaaaatttgtagatttaagccaaaataaaattagcaacttagagaatctcgctaatttaacagaattagaaacggtatcacttaactacaatcaaattacagatattactccactaatgaactcacctaaattatataacttagaattaggcgttaaccaaatctctactttaccatccttcgaaaatttaactaatttaaggatattaaatctaagtagcaatcaactaaaagatatttcggccctaaaagatactcctcaattaactaatttatctatttcagcaaataatatatcagacatcagtgtcctttcagaatgcgataatctccgagttttttatgccgaaagcaatcaactgacttctattgagtcattaagaaataaaacaaaactagaatacttcgatgctaattttaatcaaattaaagatgttacacctctcagtaccattccaacaattaggtcaataaaaattgaagaaaatcagattagtgatttcagctcattggcaggtcaccgcttagaattgtttgatgctactggacaaaatatataccttccagatgttgcgctcggcgattccactaatattgtaatgaaagataatctcggagtaacattacatgattgggtttggtacaccccaggaacttaccaaaatgatacacttacttgggaaaatgcaggcgataattccgcttactttttaaataatcaatatccaacttacccttctgtcacagtgactgtctatcaaacagtcactccttaaataataatagcctagttcttttatagaactaggcttttttactttcttcttctcgtttcaaaagcgaatttgccatcatttggaaacaaagaattaaaatcataaataccactaatggaggtaaaattatccagaattggtggttggcgaacacgaatttagcgtttgcgattaaaccagataattcagggataactgggtttagcatgccgtcatcggcgcccatgattgcccctccgatgaaaattccaaagatagctaaatggacgaacatctgtagcgtttgaatgagctgctcaatccaaatcaaaattaatttggaccagatttgtggattgatatgcttggttaatatccagcgagcatttccgccaaaaacgagcgcactcaagacgaactctttttttaacacctgggaaatttcactgctgattcggttggttgtaattggtaaaacgatgacaaccatgattaaaatttggaaggttatgcgtgtaaaaaggcttgtttcgaaaacgccagaatagctgatgaattcgttgaccatgataataaagacgagtaatgacagtggtagataatgcattccgtccgctattgattgaacaaaattgcgggttcgtggcttgctgaaaaatgcgagcggtactgccaaaatgtaaccaatcacgacacgtagcgttgcgatgatgacagctataagtagcgtatacttgatgccgacgagtaattggtcgagaatggagttgccggcttggtcggtgcctagccatacttgcgcatttggtttgaagggcgccatatcggtcactcgtccggtcgcatcactgataaatttaagcgagttgattttgtctcccataagcccgtaaataaggctcgcgattagtaagatgctaagtgttgccagcggaatgctgaaggatgggcgttttaggagctgcccggtcgttactacaaagttgcgccatttgcttttaaggtttactttttccgtaaaggttttctggaaactattccagtgcagcggtattcgggtcacgtttgcgctct

SEQ ID NO: 3748 - DNA, 3653 bp, Listeria monocytogenes 4b
  misc_feature (1)..(end): n can be any nucleotide: a,g,c or t/u
aatcacgtgtccacggagcaaatggtattccaggagattggcgtcatttgaaagcacatggcggcgggatggtacttgattggggtgtgcatctacttgaccaattgttattcctagtagatagtaacgtgaaatctgtatctgctaatctaagttttgcgcttggggatgaagtcgatgatggcttcgtcacgttcattactttcgaaaatggcattaccgctcaaattgaggtaggcacaacgaacttcattaaattacctcgctggtatgtcaaaggtacagaaggaactggaattatccacgactgggatttaagcggggaaatcgtcaaaccaaccgcactcgctaaaacgtctgagccaacgccaattaaagcagggcaagggcttacaaaaacaatggcaccaccaagcgaagaagcaaccaatacattatcgcttccagcacctgccaaattagctccatctttttataataattttgtcgatgttttaaataatacgagtgaaccaatcgttcaaaatgaagaagtttatcaagttttaaaattgattgaagccatatttgaagcggctgagacaaatcgaactatccattctatttaaaaaagatgttttagcttcctaaactgtggaaaacactactatggagataaagaattcttcattagaaaatattctaattaggaggcaatatcaatgagcgaagataaaggcatgaaagacaaagcaaaaggacttaaagacaaagtagtaggtgacgcaaaagacaagttcggtaaagcaacagatgataaaggcaaacaagtagaaggtaaagctcaaaaagctaaaggcgaagtagaagataaaactggcgacgctaaaaagaaattatccgaataagttaaaaagagcggcttgaatttttcaagccgctctttttttggtccaataatagcaaaaggttttgaataattttacggaggtataaaaagaaagtatgtgaaaataaacgtgcaggaggaaaccgataatgacaaaaaaagtcttaccaaaagaagcgtctgaatttacaaagaaagtgaatgagaaagtaaaaaaagctttaccatttgagaacacgaaagattttgaagatgcaaagaaaggctttattggcacttgggatcatgtaaaagttgatacggaagatggccatgcagtttgggatttggatgattataagtttatcgaaggagaagcacctgattctgttaacccaagtttgtggcgtatcgctcaacttaatatgacaaatggtttattcaaagtaacggaccgggtttatcaagtacgcggctttgatatgtcgaatacgacgattatggaaggcgatactggccttgtcattacagatacattaatgtcggttgaaactgcccgtgcggcgcttgaattatactttgagcatcgtccgaaaaaacctattaaggcgattatttatacgcattcccatgccgatcattacggcggtgtagcgggtctaattagcaaagaagatgtaacctctggaaaagtggcacttattggacctgaaggctttatggaagcggcggtcagcgaaaatatttttgctggaaatgcaatgattcgtcgtgcggaatttatgtatggtagccgtttgtcacgcggggaattaggtcaagtggatgcaggacttggtaaaacagcgtccaaaggccacatgtccttacttgctccaaatgatactattacgtttgatcatgaaaaacgcgtggttgatgggattgaagtggaattcttaatggcgccgaatacagaagctccatcagaacatatgatgtatttcccgcaatttaaactacttaatattgcagaagatgctgttcataacttgcataacattttaacattacgtggtgcgcaaattcgtgacgcttacgagtggtggaaagatattgacaaagcgattcgtgcgtttggtgataaatatgaagtttgtatcggtcaacatcactggccaacgtggggtaatgaagagattaatgacatgcttattcaccaacgtgacgcttataaatatatgcatgaccaaacgcttcattttattaataaaggattaactgccattgaagtggctgaagctgtgaaattccctcctgaactagaagaaaaatggtatttacgaggatactacggcacgcttaaccatgatgttaaagcgatttatcaattttatcttggttggtataacggaaatcctgctgacctttatccgctacctccagaagatgtggcgaaaaaatacgtcgagttcatgggtggcgttgatgaagtagtgaaaaaagcgcgtgtatcctatgaagcgggtgaatatcgctgggttgcggaagttgtcaaacatgcggttttcgcagacggagaaaacggagaagcaagagctcttcttgcagatgcgttagaacaacttggctatcaatctgagtccggaccatggcgtaatgtatttttagccggagcagacgaactgagaaattctgtcccagatgaagttatttctggtgttacactggatattgtagaaggtatgccgtttaacttgattttagattacatgggtattcgtttaaatggggaaagatccatcggtaaacgtatctccatgaactggaaattaacagatgttgatgagaattatcatttacttgtaaataattccgtacttatttatcgtgaaggtgaagtagacgataaagctgatttaactttaactactactcgtgatacatttaatcatattttcggtggtgtgaaaagctttgaagcagcatttgctgaccaaacagctaaattagaaggagacgcgaagaaatttggggagtttgcttccttgttagatgaatttaatcctgtcttcaatattgttacaccttaataaaaacaaaaaacgctttgtttagccttttatcaggctataacaaagcgtttttatttttcagctaaatatttaattttatctggtacgtttttgatttttttataattaacaaccattttgttctcgccaacaagtactttgaattgctcgttcttagttaattctttttctgagtagaaagttagttgtttttgttttcctttgtcatcataaacattcgatacatatttgaaccctttgaattgatttttttgaacgggttttcctgcgtcttctacttttacgtaataggatttcactgcggcgtcagttggcatcgcatactcccaaatcgcgcaaacagttagaagaactgcagctaataatattaaacctctttttttagtaaacatttctccttcatcctttcttgatttgttttattacattaagtttacaatggaatgacaaaattatcccgtttgttaactaacaaaatccagcgttaatcttacatttttgtcagaaaggtaacaaaagtgagtttaaaagattgtgaagttacaaaacaaactttttttaactactaaatatagaaactagcgaaaaaataggcactagaagtagtagcatttttatacttgaaatatgctcgaaaacacacaagtgccggaaaaaatttttttatttgctgaaaaccttgttgtaatcattgtttagacacttttcgtaataaaaccagagtactatat

SEQ ID NO: 3749 - DNA, 4213 bp, Listeria monocytogenes 4b
  misc_feature (1)..(end): n can be any nucleotide: a,g,c or t/u
atggagaatatttatttggttcatcgatgctatcaagaccactggtaacatgtacactcgccggacttatcatgggtgatgtacaaatggggattattatgggagcaactttggaattagcttttgtaggatcattttctatcggagcatctattcctccagaaattatttcaggaagtatactaggaacagcctttgcgatttcgactggcgagagcacagcggtagcattagcacttggaattccgattgcttcccttgtacttgtcgttaaaaatctatgcttcattttcgtattaccttactttgttcataaagcagataaatacgcactcgagggtaattcacgaggaatcagtcgaatgcaactgctcggcggatttttatcgatcaacttaccaattggtattattgtcgcaacgtcctatctagtcggaagcccagtcatccaaaacgtacttgatgccatcccggctttcgttataacaggacttggaattgcgacaggtttactgccagcatatggttttgctttacttctcaaattaatggtcaataagaagaatgccgtatttttcgtatttggcttcgcattagctgtttatttaaaagttcctgtaacaggcgtagcgattttcgctgcatgtttagcgctaattttaacaggttatgcaacgcttaaaaatgacaatggtccaaagaattcgaatacagagccagcacttgcgaatgatggaggtataaattatgaagatgaagagttctgacgtattaacaaaaaaagacttaatgaaagttttctggcgctcgttcacgatggaatggtcatggaactacgaacgacaatccaatctcggttatggattttccatgctaccagccttaaacaaaatttttaaaaatgataaagataaacgaatttcttcttatcaaaggcatttagaattttataacgtaacaccgtggctttccacttttccgctagggatttcgattgcgatggaggaacaatctgcgaaagataaagattttgacacagactccatcaataatataaaagtagcgttaatgggaccgctgagtgggattggagattcgttcttctggggaactttacgcgttatcgctacaggtattggaacttccttagcacttcaaggaaatatgttagggccgattttgttccttcttattttcaatattccagctattctgactcgttattatggattatttattggctacaatatcggagctaattttatcgaaaaaattcaaaaaactggattaatggataaactgtcttatggtgcttcggttatcgggctggccgtagttggtgcaatggtcgccacgatggtgaacattaacatgccaatgaaatttggctctggtgatgatgcagtaacgattcaaagtgtttttgacggtatcgtcccaggaatcctagcacttggcttcaccttctttattttctggttagataaaaaaggactaaaagcacattggattcttttattaatcgcaggaattggaattttaggagcgttcacaggtttattaaaataagtaggtgaaaaaatgaaaaacatggattattatatccggtcggaacaaagtgtttatgaaaatatcatccgaagtcgaaaagatcttttacaaaaggtcattcaaatggagaaagtggactatcaagcaattgttatttttgcaacaggttctagttctaatgcggcatttgcagcgcagttatatatgtcggataaactcgctattcccgtatatgtggaagaaccgtctactgcaggaaattacatgcttcacttaaacaaaaacaccttatacatcgctatatcacaaggtgggcacagttattccactattcatctcgtaaaagaaattgagcgtcaaggtggcattgttttcactttaacgagcgacttaacaagcccgattgcgaaagaaagtacgcgggcaattgatctcgggatggggatagaagagatgccatatgtcacgcttggttatagcgcaaccattctcatgttgaatttaatggcgcttgagctagcccttttacaagagaaaatgttggaagaagaatatcaagcggaaattgcagaattgaaaaaaattaccgctaatttaccaaaagtggtagagaaatcagcagcttgggtagacgcgcatacacaggaattgatggaagcggaacgagttttcttcataggatacggcgctgcttatggtgtagcgcgcgaaggagaaacaaaagtaacagaaaccatccggattacagcttttggtaaggagttagaagaatatatgcacggaccttatataggtttatccgagcaagactatattatcttccttgaacctcaaggcttactagaagaccgcgcagaaaaattaaaacaatttttacaaggccatgtaaagaaaatccgaacattttatgcggatgcaggcggggaaaaggcagatgatttattactcggtgtgcgggcagcagaacttctgacaccgctgtttatgactattccggttcatttattatcctttgaaatttccaagaaaaaaggaattaatttagaagtatccgcttttccggagtttgaccaaataacgaaatccaaaatttaatcaaagaaagtaggaatgaatagtgctaaaatttgatgaacaaaaagtgagagaaaacatggaaggagcgctaaaattacgcccgcaaattaatgaagtagttgaccaaatacatgaccgcggctttagtaatatttgctggctaggaattggcggtacatacgcgtccgccatgcaagcagtggtgcatatgaaagaaaaaacggcattagaaactttttatgaaaatgctgctgtgtttctaacgacaggcaataaacgtgttactaaagatacccttgtagtcatttcatcggtaactggaagtacgcaagaagtggtagatgctgtgaaaaaatgtaatgaaattggcgcaacggtatttgggtttattgataaagcagaagcggaacttgcgactttagtagatcacttaatctcctatccgttaaatgaacaattaaaattcttcatggtagcagatcgttttatgtatttagctggcgaatttgaagattacgatgcgttctatcaagaaatggatcaacattttgcaaaagggattgtcgaagtagaaaaagcagcggataaatttggtcaagaatttgcgctaaaacatcatcaagacgacattcattatttcgttggtgctgggaaccagtggggtgcgacctattcttacgcaatgtgttattgggaagagcaacactggattaaaacaaaatcaattgagtctcacgagtttttccatggcatgtttgaaattgtagaacgcgatacaccagttaccatttatgtgacagaagatagccagcgttctttaagcgagcgagtagttaatttcattccgcaaatctgtgccaattatacagtcattgatgcaaaagattacgatatgccgggtatttccgctaaattcagaggggcgttatcaccatttattatccacgcagtaaataatcgcattgacgtacacgtggaaaaaattaactgtcacccaatggaaatcagaagatattatcgtcagttagactattaaaaaggcggtttgaaaaatgaaagcaatttttgtttgtactcatggaaatgccgcaaaagaactcattcaatctgcagaaatgatttgcggtaaacaagaaaatacaagttttgttccttttgaagtgaatgaatccgcggaaaatttacaggcaaaaattgccagtgaagtagctaaactcgatctaacagaagggattttatttctaaccgatttaaaaggtgggactccgtttaatgtactcgttcggttacttcggaattttgatgcagtagaacttgtcgcaggcgtgaatattccgcttttattagaagcaatcatcagccgtgaaacgctatccttaaaagaacttgcgaatcaagttgccgaaactgggcggttaggaatttatgaatatgccgcgccgcttgaagaaatagaagaagatttttaataggaaaaagacagccgcggctgtcttttttttatcttctctctcgaactatccccgctgttacgttatactaaaaagaaaacgatggagggatgaaatggataaacagaaagaac

SEQ ID NO: 3750 - DNA, 3247 bp, Listeria monocytogenes 4b
  misc_feature (1)..(end): n can be any nucleotide: a,g,c or t/u
catcaaactattactaaagcatatgtggtattatttgttttgtggattgctgtttttattgtttgttgttttcgttttagaaaaaaattaagaaagggtgattttagaaaagattctgtattacaaaataaacggggtaacttaggattgaatttaagcaaaaaaacatacatatcaattggagcattttttgcatttatattactagctcaacttattggaggagtaatgatatatgtattctttatctctatagcggttttatgtatggcattatcttttctaggattagtgatctttcctgaacaaattttcactgcttattgtaattttaaagaatttcatatcgaagaatagggagcttaatataaataactattttgtaaagttcctaatggttttctatccaaggattgcagtaattaagaactactttgaatatgacaataacaagcagagaaagaaaaaggcaacacttacatataaattagactcaatccaaaaaataaaaaaacatccatgttaattttcctggtacctccaatctccccacctgctatactaaccccatcctaacaaatggagttgaaaccaatgacaaaaaactttgaaaaactaaaatccctacacgaactacccaccccactaatcctctacaactgctgggacgtcgcttccgccagagcaatccaacaaggcggagcaccagtaatagcgacaagcagttatgcgattgctgagtcacttggcgtagtggacggggagcatttaacttttgatgaaatgttttcagttatttcgcgcatcgccgagaatgtgagtttgccgctaacggtggatatagagactgggtatgctagaaatttggaggaactggctcagaatgtggagcggttgcttgtgattggtgtttgtggtgtgaacttggaagatcagcttattggcgttacaaatccggggttatgcagtactgaggagcaatgtgataaaatcgagacaatcaaagaaacggcggtgaaaatgagcacggaaatttttatcaatgcgcgtatagatgtctttttccaagggcgggatgagacggctgacttggtggaagaagcgattagccgagcgaatgcctataaagaagccggcgcggatgctattttcattccagggctgttatcgccgaatttaattcgcgcatttgttgagaaatcaccacttccggtcaatgtcatgaggatggatgggatgctctcaaacgaggacttacaaaaaatcggtgtgaaaagaatcagttatggaccgtttagtttttttcaggctaatttagcgattcagctggaagttgagcggattttcgaaggagggaaagccttgtgataacgaatcagcgggatattgataaatattatgatatgttagtggagaaaaattcgaattatgaaggcgtattttttgttggagtgaaaacgacgggaatactttgtcgcccaacgtgtccggcgaagaaacctttaaaagagaattgtgagtttttcagtacagccaaggaggcgctacttgcatcttaccggccttgcaagcgttgtgaaccactctccaatccgacgaaattgtcgccagctgtgaagttgcttgttgatgcaattgagaaaaatccagagaaaaaatggacggataaagattttgatgaattatccattagcgcaaatacagcgcggcgccagtttaagaagcagtttgggatgacttttattgagtatgcgcgttcgcggcgtctcggtcttgcttttaagcatattcggggtggaaattcgatcattaatgcacaaattgaaagtggttatgagtctggaaatgggttccgagatgctttttcaaaaacgatgggggaggttcctcacaaatcaaacgatatcatcattttatactccgcttggcttgagactaaacttggatcaatgctcgcaatttctgatgatgaaagtctattgcttctggaatttgttgatcgaaaaggcttggaaacagaaattaaaaaattacgaatgcgcttaaacgcggctattacacctgaaaaaacagtaataattcaacaaatagaagccgaattagcgcgatattttaatggtgagttgattgattttaaaacaccgatttgctatatcgggtcagattttcaacagagtgtctggaatgaactgcgacgaattccgataggcgaaacaatttcgtacaaaagtttggcagaaaaactagggcggccaacagcaagtcgagctgtggcaagagcaaatggggctaaccaattatccctcatcgtcccgtgccatcgtgtaatcaatactaacggagcattaggaggctacggtggcggtcttgcgcgcaaagaatggctaattaaacatgaaaagatggttccaaggtaacgcggaaccatcttttttcaattatttaacccgtattccaaacaacggcatcaaagcaggagcatgcgaaaaatcaatgctcacgcccttcaaatcttgcggcattgcagtgatagactcaaaaatacatgagctaagatcaacaccatttagcgcgcaatttaaaaactgcgctttattcaaatcaagccgttccaaataggtatcgaccagttgagccccgctaaaatcactattcgtatacgcgcccgcctcaaacgccacccatttcaagttagcataacgaaaggcaacataatccgcataacaatcaacaaaaacgcaatttctaagcgtagcatcgctaaaattcacgccaattaatttacaattttcaaaacgaactcggtgaataattgcgcccattaaatctaaattcgacaaatcacaatttttaaatacaacatcagtcaaattcgcgcttacaagagaaacagaatcgaacacacacccatcaaaaataatcgtttctaaatgaaaatgctcgaaaatttccccagttagcgttgtttttctaaagatttgctcactaacttctccaatatcttcaataaaatatgtatcattcggataaaccgtcaaatcctcatcaggaatccgcggcgcagtaatttttttcattatatcgacctcacttccgctttcattataccgtattttgctaggaaaaggagcggaaaatcgtttacctttcataaaaaacggattacaatgaatgtagaataaaaatggcagttgaggagtgaacgtgatgacagcgagcgtatttgtagcaggaaaattactaccag

SEQ ID NO: 3751 - DNA, 3830 bp, Listeria monocytogenes 4b
  misc_feature (1)..(end): n can be any nucleotide: a,g,c or t/u
acgcggagtcaactattcaagtggaagaagccgtaaataatttagaccgaaaaatcaccgagtacttaacgaaaatttcttctgtcgccctaacgaacaacgagacagaagaacatgcgctaatgcttgataccgttcgtgatattgaacgcgtcggtgatcacatggaaaacatcgtagaaaacatcgatcaactgattaagaataaagcaaaaatgtctgaagaagcttctgatcaactcatcgaaatgtttgagctaacaaccgcgaatttcgaacgtgcagtgaaatccatgcataaaaaagatcgcgcactcgcagaagaaactattttagtagaaaaagatattgataaagcagagcgcagattacgtaaaaaccatattcgccgcttaaacgaaggcaaatgccaagtcgttagcggaattctatacattgatatcgtcagtgatttagaacgaattggtgaccacgcgaacaacattgctgaatctgttttggaattaaacgaataattctaaagggaactagactatttgacgtctggtttctttttttgttaaaaatctacacttttactagtccttgtgaagcattgagtataagcggatagtggtgtaaaataagaatgattataaaactagaatgactggaagtgttgagtcttatgcgaaatagaaaaacaatggatggaaacacggcagcagcttatatttcttatgcttttactgaagttgcagcaatctatccgattaccccttcctccaccatggctgaacttgtggacgaatggtcatcaaagaacaagaaaaatttattcaatgaacctgtaaaagtagtagaaatgcaatcagaagcaggagcagcaggaacagttcacggatcacttcaagctggtgcgctaactagcacatacacggcgagccaaggtttacttttaatgattcctaatatgtacaaaattgccggtgaactattgccaactgttttccatgtttccgcaagaacaatttcggcggcatcgctgaatatttttggtgatcatagtgacgtgatggcagcgcgtcaaacaggatttgcgatgctagcagaaggttccgttcaagaagtaatggacttatccgcggttgctcatctggcttcactaaaaggaagtttgccatttttaaatttctttgacggcttccgcacaagtcatgaattacaaaaagtcgaagtactcgaatatgacgaattagaaaatttgctcgacaaagaggcattacaacaatttagaaatcgcgcaatgacaccaaataatcctaaaactttaggttcgaaccaaaatccagatatctttttccaacaaagagaaaccgtgaaccgttattacgaggaaattcctagtatcgttcagaattatatgcaagaaattaatcagcttcgtggcacggattatgacttagttaattattatggagcagaagacgcaacagatgtcattgtggcgatgggctctgtaacaccagtcatcgagcaagtcattgattacttaacaacccaagggaaaaaagtcggtttgctaaatattcgcttatatcgtccattcccagcagaaaactttttagcaaaactaccgaaaacagtagaacgtgtggctgttttagaccggacgaaagaacccggatcaggcggagaaccacttttactcgacgtgcaaagtgtgctttatgatagtgaaactcgtccactagttattggcggtagatatggcttaggttcaaaagatgttacaccagaccagattctcggtgtttattcgcacctaacgacagaaaaaccaaaaccgcgctttacaattggaattacagatgatattacgaatctatctatcgaaaatgctggaccaagtgatctcacttcagaaaaaactttccaatgcaaattctggggttttggctcggatggtactgttggcgcgaataaagccgcaatcaaaattattggtgataacaccgatttatacgcccaaggttacttttcctatgattcgaaaaaatcgggcgggctaactgtttcgcatttgcgctttggtgaaaaacgaattcgctcagcctatctaatccaacaagcggattttgtctcatgctctacctcggcctatttacgttcctatgatttattaaaaggtttaaaaccaggcggaacattcttgctcaataccatttgggaaggcgaacagttagaacgccatttgccagccgcaatgcgcgaatatattgcgaaaaataatattcaattttatacattaaatgcaatgagaattgcaggagaagcgggacttggtagaagaattaataccgttatgcaaacggcctttttccgagtgaccgacattttaccgtttgaaaaagcacttgctgatttaaaagaatcggctatcgctacttatgggaaaaaagatatggcggttgcggagaaaaatattctcgcgatggaccaaactgttgctaatttgcataaagtagaagttcctgcaaggctgggcaaatccagttgtaacagcagaaacaaatgcaacgactgaaaaaccagcttacgtacaaaatatccttgagccagtgaatcgcttagaaggcgacaacttgactgttggtgatttaatttcgaatggtatggtcagtggggcttatcctccggggactgcagcttacgaaaaacgcggaattgcactcgaagttcctgaatggatttctgaaaactgtacgatgtgtaatgaatgcgcctttgtttgtccgcatgctgccattcgtccaattttaacagatgaagaagaaatggaatctgctccagaaggctttatgacaagagaaatgcgcggcaaagatggccttcgttaccgtatccaagtttccccaatggactgcactggttgtaacttatgtgcggaaacgtgtccggcgaaagataaagcgcttgtaatgaaaccatttgaagaagtcgcagctaaagaaaatccgaattggtcatttgcgattaatgtgaaaccgaagaaaaaccctgggaagaaaaatactgtacctggaagccaatttgaacaaccgttattggagttctctggtgcttgtgcaggttgcggtgaaactccttatgttaaattattaacgcaaatgtttggcgaccggatgatgattgctaatgcaactggttgttcctctatttggggcgcatctgcaccggcaacgccttatactgtcaatgataaaggacatggaccggcgtggggcaattcccttttagaagataacgcagaatatggttatggtatgtatttagcaaaccaaaccatgcgaaaagctttaaataataaagtgacaaaagcactcagagaagaagccatgtcagaaacgttacgcgaggcgcttattgactggcaaacacaaatggacgtttcagaagatacacgcgaacgggcagaagcattacaacttgcgcttcttagtgagatggaaggcaacgcggcactcgaatccatctataatgaccgagaattatttattaaacgatcgcagtggatgcttggaggcgacggctgggcttatgatattggctttggcggaattgatcatgtgttagcatcaggcgaagatgtaaatattttcgtaatggataatgaagtgtactcgaacactggaggacagtcatcgaaagctacaccaacagctgcgattgccaaatttgcttcaggtgggaaatctgtcggcaaaaaagaccttggtattatggcgatgagttacggaaatatctatgtggcgcanattgcgatgggggcgaacaaacgtcaaacctta

SEQ ID NO: 3752 - DNA, 6157 bp, Listeria monocytogenes 4b
  misc_feature (1)..(end): n can be any nucleotide: a,g,c or t/u
gtactcagctactactgcatgctgagcgccgacctgtgctggaaagatttagtttctgtcctgctagtgcaaggacttctccggaatatggatccatggcaacaacgaatgcgcggtcaaataaatctgaaccagcatattgtttaccttgtttgatgttttttttgagaatttcttctactgctttttgaaattcaacatcaacagaaagaactaaatctttccctttggagccttcgtatttgttgacagtttcaataatattacctttagaatcaagtacgctttctgattgagattttgatccagcgagcacactttcatattgagcttctagatagcttttaccaacgcgatcattacgactatatccttgagataagtagtattccgctttgtcttttggtagaccttctttagctgtggaaacagaacctaaaattgagcgtaaagtttcatcatatgtgtaataacgattccagtctgtagtagtatctacaccaggtaaactgtccatattttcactgacacgtgcgatttcttcgtctgttacatctttatttttcacaacagattcagtcatagcatatccagttgtcatttttttatagatggttgctacttttaagtcttcactggtcaagctagcgatatcttcttttgtcactttgtcaacttggattttgtaggctttagatgaatcaagcgcttgttctttcgctgataagcggtttagcgattcggtttgatgcgttaaaatccagtaatctttcaaatcacggtcagttaacttttcaggctcgacagtaattagcttttctaatgtttgggctacatgtagagtttctgcagtctgtgtttgttgactacgtgtgtaagtaatagatttaaccgctgaattaccaaccagcaaattgtaatttcggtcataaatgctaccacgtggtacgtttttggaaactgttacgttatctgtttcttctaattgacgtttgtacgtatccccttgcacaatttgaacaataccaagacgtaaaattaacacggagaataatataaaaataataaagaatagaatatttaaacgtagtggaatgatggcgcgtttcttcttagtggaatcttttttcttttttctaaaatttagtttcacgcatagttacctcacttttcaataatacctttccctattgtagctgaaataacatgatttttccactgtaagttcattagaaattcattagaaataaaaaaagacccaccgaagtgagtcttgtgattattatttagctgcgtcaaaacgtttgttagcttcatcccagttaataacattccaaaatgtgtcgatatattcaggacgacgattttggaatttaaggtagtaagcatgttcccaaacatctaagccaagaacaggtgttttgccatcgcttagtggagaatcttggttagctgtagaaacgatttctaatttgccatcattaactactagccaagcccagccagaaccaaaacgtgctgcagcagctgcattgaatttttctttaaattcgtcaaaagtaccgaattcgctttcgattgctgcttttaaattaccagttggagcgccgccaccatttgggctaagaatagaccagaataatgtatggttagcatgaccgccaccgtggttacggacagcgccgcgaatatcttcaggaacgctatctaagttagctactaattcttccacagatttgcttgcaagttcaggatgaccagcaaccgcttcatttagttttgtcacataagtattgtggtgctttgtatagtgaatttccatagtttctttatcaaaattcggctccaaagcatcataagtataaggtaatttaggtaattcgtaagtcattaaaaattcctccttgtattgtttttacgtgaaaagaaatgacgtataaggcaaaagtttcatgtcctatttcaatagaactactatcaaccttaaaaacagtttcttcttacaccatttagcctaccatgctcctgaaatgcttgcaatttttctgctcagtgatgtttcaacattgattttgcaaccatttcgagctatgattaagtttaggtggaaaaagtacgttcttttgcacatacatgtatctttttccctgaaactcaaaagttaaaccattaggcgaggtgttgaaaaaagaatgaatatttttaaacgcttctggaagagtttatactcccctgcggatatagcatcgtttcgaaatgataaaattaggaaaagtatcgtgtacattattgttttatcatttgtaacattccttccattagcatattttacaaacattacaacaaaaaatgcacttaaagttggcgaagaaactatcaccaatgaaatccccgattttaaagtgactgatggcaaattagtgttaacagataaaaatgcaaagaatatacctatctcgattgatcaagatgaactacatatttattttgatgcttctggaacactggataaggatgatgtagataataaaatcgcttcttatgatagcgcggtagcttttctttcagatagtatttatattactgcagctggtgtttcgcaatctgttagttatgacacagcaggaattagtgataagtcagatttagttcatttatataattcgattgagtctttagctaaatactttattccaattgctttactagtgctctttatctttacgttaggctcggtcttcttccgagtagcactgtatgcacttttcggatttatcctttctggatttggccgaactggtatcgccttccgccaaaattggatgattgcttcttacagtattaccctggcagcagttttcactatgattatggaagctttacaaattattgttccttttggaatggaaattaatatggtcgtgagtatgatttttgttttccttgcgattcgttcaattcctccaagcgagcctacaattttagagaaataaatgatagccacttgctcacgcaggtggcttttttgtggcatcattcacgtgattttgtttcatgaaaatggtatgataaaaaataaaagctagtctaaaggagcggtctctttgaatgaaagaatctttcgcgaaaacactcggccagtccaagtaggtaatttaactattggtggtagtgaggaattaactatccaaagcatgactactacaaagacacatgatgtcgaagcaacagtagcggaaattcaccgattagaagaggtgggttgtcagattgtgcgagttgcttgtcctgatgagcgtgcagccaatgctcttagtgccatcaagaaaaggattcatattcctcttgtggcagatattcattttgattaccgactagcacttaaagctattgatgcaggtgttgacaaaatccggattaatcctggtaacatcggtcgccgtgatcgggtggaaaaagtggttaatgctgctaaagcaaaaaatattccaatccgtattggggttaatgctggtagtttagaaaagaaaattattcaaaaatacggttaccctactgctgaaggaatggtagaaagtgcacttgatcatattaaaattctcgaagatttagatttttatgatatcattgtttctttgaaagcttctgatgtgaatttagcaattgaagcttatgataaagctagtcgcgcatttaattatcctctacatcttggaattacagaatctggtacgcagtttgctggaggaataaaaagtgctgctggtttaggagcgatactcagtttgggcattggaaatacattacgggtatctttgagtgctgatcctgtggaagagataaaagtggcccgggaggttttaaaatcgtttggcctttcctcgaatgccgccatgcttatctcctgccctacttgcggtcgaatagagattgatttgattcgtatcgctaatgaagtggaaaattacatagcaacgattaaagctccgattaaagtagccgtgcttggctgtgcggtcaacggtcccggagaagctcgcgaagcagatatcggaattgctggttcaaatggagaaggccttctttttagacatggtaaaatcatccgaaaagtaccagaagccattatggtagaagaacttaagaaaggaattgatattttggccagaagaatattttgaaaagaaaacagatttggaaagccttagataatcgtatcggggtttttgtttcaagggggatttttgttggaaaaagaaaatgagcttagtttttatgatggtgttagagcctgccttcctaccgtccttggttatgctgggattggtatcgctgcaggagtagtaggaaaagcatcccatttaagccttttagaagtgacgctacttgcgattatcgtttatgcaggtgcggcgcaatttattatttctggtttgttattactacaaagtccgatatcagcaatcatttttactacttttttaattaattcaaggcattttttaatgagtatggcggaagctcctcattttaagaagtattctttgtggaataatattgggattggtgcccttctgacggatgaaacgtttggggtttcgatgaatcagattggtaataaaaaacctgttagtgctaaatggatgcacggaataaatgtaactgcctacttggcatggattgtcgcttgtatcgttggggcatttattggcaactggctcccaaatccagaacaatttggtttagactttgcgttgtctgcaatgtttatcggtttgctatatttacaagtagtgagtgataaaagcaaaaaaataagtacgagtttgttcgtcatgatactagtcgctgtatttttaattctctttatgcgtgtgatgacgccagaactagctattttaactgcaaccttactcggatgtttgatgggagtgattatagagagatggcgttaagttcctatactttatttgtcattgttggatgtggacttgtgacgtttataccgcgtgtcttgccgtttatatttgtgcgtaaattacagcttccagatgtagtgattcgttatttatcgtatgtccccctttgtatcctcactgcgctgttcgttcaaagtttattaattacaagggaaaatggttttccaggaattaatatagagaatttacttgcatcacttcctaccattctaacagctattttgactaaaaatttaatgtggattgtgattattggaattatttccatggcaatgattcgtttatttgcatagaaaagccctttactggagtgtgtttttgacgggaatcaaaaccagtaaagggctttttgtataggtggatccgaagtaatattagttagatgttgttgtggaacttgttgaagatgtacttgtgtaatctgcaaatgcatcttttaaatcactatctttaatatcaatattagcagcttttaactcttttttgagtgcagctgtcatattttctgtggttaattgagattcaatatatgcggcttttacgtttgctttttctttagcgtaagtgcctttttctgttttcttcactaattggatcaagtgatatccgtaggtagatttcacaatgccacttacatcatctttattttctaatgcataggctgctttttcaaatgtttcgtccatttcaccgggaccaaatggatctaaaagcccaccatttgtactagttgctgtatctgtagaatattctttagctaaatcagtgaatttttcaccattttttaatttcgtttgaatttctttcgctgtagcttcatcgtctactaaaatatggcgcacagtaatatctggttcccaagttttgtagtaggtttttagcttgctttcacttacattcatgtttgcttctgttgctttttgaacaagtaaattatactctaaattttctttgaaagaagtttttgttaaattattagaggataacgttgattcaaatgagtcaccgtattgttcttcatatttcttgtattctgcatttacttctttttctgttacggtgtatttatcttctaagatttttttgaaagtaagttgttgcacgaccctttccagcacatgtcggccgctcagacaggaggagtgtgcactatgtatcnntcccaccacggttaggac

SEQ ID NO: 3753 - DNA, 4887 bp, Listeria monocytogenes 4b
  misc_feature (1)..(end): n can be any nucleotide: a,g,c or t/u
tcgtccccagctgttggaagtgtggtattaccgcctgaatcacttggattacttgtaccatcaccatttcctgttggggtattaggagttggatcatttggatttgggctatcatttttagtgaattgggcatatagtgtaatatttcccgccggcattttaccagtagcaaaatcccatttagttccacccgttttagcatcgtaccaacctttgaacgtataacctgctttcgttggcgctgctggttcttctaacagactttgataagtgactttttgcgtcgttatttttccatcattgtcaaatgtggcagtatagctattaatcgtgaactgcgcatacaatgtgatattttctgctggcattttgtccgtgctgaaatcccatttattcccgccagttttggcatcataccagcctgtgaatgtgtaaccttctttcgttggtgctgttggttctttaattaattcattcgcgccgactgtcacacttgtttgttttccatccacatcaaaaaccgcagtgtaagcttctgttaatggttgggtaactgttccactgaaaggaaccgttgtatttttgaaagcgactgattggttaaacgtgtagctaacattattaataaaactagttaaattccatgttaaatttggactagcgtatgttccattgtcgctaatagtagcaggtgcaataggcgcgccagaagaaccttttactacattaggaacgacaagattattttgataatacacgggttggttggtaattgtttgatttgttaaagtgactataaataagttcgataaattagcaagtgggctgacatcactaatttgattatctttcaaatgaacttctataaggttaggtaaactcgcaagtggcgaaatatcacttattttattatcatcagctcttaaagtcgttagtttagataaattagcaagtggggttaaatcatttacttggttatttccgattgataagtattgtaaattagttagtcctgcgagcggacttatattggttatttgattgaggtccaaatataatacctgcaaattggaaagacctgcaagtggagtcacatctgtaatttgtgtagaagttaaatctagcgttttaatgctttgtaacccagcaatcgcgctcacattttttaacggatttccagataattcaagctctgttattttcgttaaatttttaagaggagttaaatcagttatttggttatctttaagttctaaccctatcaaattatttaagtattgtattccttctatcgttgttactccagtattaaatgctgataaagtagctattccatctaaatctgcttgcgtaacagcgtctgttacattagattttccagtcgctgttttaactgcattcgcaagagccggatcagggaaaataacattaattggggttggctgcgcaatgctttccgcgcgaacctccgcaccttgacttgtcgttacatatagactaataccgagaatagcagctaccattaaaactagtttaaatacagaattccatcgttttttcatagtctctctccttttatttaaattaaaaccattaattgttctaaataaatcgttaatattagatacccttttttagatttacttaacaaaaaaagggattacttttttgccttcttataatttgactgagtatataatccggtgtcgaatacacctcagcgctgcattattttggatggtttagcgtaaaacattactagcctttggtgaataattataacagaagattcctaccactttttcccgcattagacccttctgtgcgaaagatgtgacgattaattgaatatttttgttcagtgccgtgtggattgtttttttgttggaagcaacagtttattctgattcgataaaaaaagacaagcaacaaattacgttacttatcttactaacgtataaaaaaacttaattttttttgaaaacagctcttttttgtatctccttaaacataagatagccatcggtttgtaagtaaggaattggtaataaggaatttatagcaataaataggctaaaaatctttataaatataaaatcaaaccctatccatattcccattgtcaaattaataacggcaggcatcaatagaatgagtgcttgctttcctaatccccaatttgaatcttcttcataagatacagaacagttaatgacaatgggtgaaatagcgacttttcttacattaaggaagaaaaagttacctattactaccttacctatctttcccttaaaaagtaggacaaagaaaatgtgggctaattcatgcaaaactaagactataacccaacttttataaatttctaaaatcattcttcttatcccggtaactcattaatagtaatgtgagcataaatatgatagctgaaccccccagtgtcggaagaatcattagcatacctatattatccccaataataactcgacttactaacaagcacgcaggcatactcaacaaaaaatctaatatcattattacataaataaaccgtttattctttctcggtgtaaaattcaaattagacatatcgtttaaaaagccattaattaaactaaatgattttcttccaaaaataaaaatcaacacagatactataagagaaaaaattactgatataagaagtatttttgctaaattttgtttataaaaagctacttgcgaaatactatccacataatttgaggcatattggtagcttggtccatgaacttttaaatagtttaagagttcatgttggtttttactagctagtttaatggaaataatagaaaaattagggttatcataattttctttctcaagctttaacaatatattatttaatttctcagaagtcttatcctcaacctcaacagttcctttactcacttgtttcgaataagagatcgctgctactggagagttaacgataccgactatttcatacaactcatcttcaaattctaatttattacctatagctgattcttcactaatatcatcatggaaaaattttttcagttgagcaaaagataacgcgatttctttagcatcgtcttttggaaaacgtcctttggttaagtgcattttagtaacaggaaaagcatttacatagttaggcgagtctgtaattatttccggaagagccaaaacttcaaacttggaattatccaaaacaaattcatttatatagctttcatctacaacataaatttgtttgatatagtctttgtcttgtaattcaatcaactcatttgtagtgagatgattaggttcctgaaattcagcttcaatttcactttccgtcatttcaatattaaaatatctagaataattctccgcaatatccatcaactcaaagttataatcactagttaaattctcttctattggaactgagcgtaaaataatagtggaggtaatattggttaataagatcgttagtactataataaacgcaaacatcaagaagttaaattttgaactaagtaaatattttaaaattcttccatttgaaacaactcttttactattaacttgaatctcgttctgctctatttcaacattagacgatacttctatcctatctttatctacaaaaatagttttatcaaaaaaatgctccaatcgagtatcatgactaactaagtaaataattttcgtttttgctaattcacttaaaatattagcaagtatctccgaggacttgttatctagattatttgtaggttcatctagaataattatagaagagtccaaagctaatgttctcactaattctactttgacaaattctccgccgcttaataattggatatctttttctaagtagtagttatctacagaaaacaactcgcaatacttttgaactaagctcggattagtttttgggaagtgtaaatatttctctacattagttttatatttccaatttttttgcgcaaagtaagctacatcttttactttatttgtgttattttttaattcattttcaataaaggttgtttttccgcttccgttactacctgtaattgtgtaaatacctggtttagtgatagaaaaaatgctaaatttatttattttattcatataatcgcctttctaatgttgtttttaattattaatggtatgacgatgtaggcaaaaaagaaaaatatcattactacacctattatggcggtaataagtaccgaatgaacaatactccacataattaaaagaaaaataacagtactaataaccgaaaagattttaaagtttgtaataagatacgttttttttctgaattgaagtagctctttttcattatagccataataagtcaatgtactataactatttttataactaacctcatacataattagtaaaattaataatactaagagtagtaagcatataagaagtgctactttttttatcagcataactgcattactgtattgattaacctcagcatttaataactctggttcatatcctttaataaatatttttttagcatatagtttattttctgctaagaaatcataaaatgattcttgagcttttaattgcacgtatgcttctgtaattaaaacatcttgttgatttacttttttcaaaatttgcgcatacacgctaggattaaattctatttctacctgatttgattgcaaagtattactataatgaagttcaaatcctagctgcttaattttagcttttttaatttctgttaaagttaaacttttaggcacgtggaaagatggactatcactattcttatagtaattgtagttntcgccattactaatgaattctgtctctgcgttcacctttaaatctccctttccacacactggcggc

SEQ ID NO: 3754 - DNA, 3654 bp, Listeria monocytogenes 4b
  misc_feature (1)..(end): n can be any nucleotide: a,g,c or t/u
gttcgattattctagcaaactctggtgcttcaaattgcatatcattggctacaactggaccagcaagctctgtttcttcttttgttgcgttgtcgtaaaaagtaatcttttcaattccagtaagtggatcgacaattagtgttcctttttgaccataaatttcgcttggcaggagggactgtgagtttttcccttgaatgatagtaatattgaatgttgggtattcgagaattattggtccaagtccgtctacaccagttggtaatttagtggcaaaataagttgcttttatgggttcaccgaatagtgtaatcgctgaatataatggatagacacctaagtcaacgatggatccgccagaaaatttcaaggagaagatgtttggttcttcaccgtttaaaacttgatcgtatctggaagaatacttcatatacgctagtgttgcaccgtgaatagtacctactttttcgatgttttcttgtaggcgtttgaagtttgactcttgaatgtggagcgctgcttcaaataaaaagacattgttttcgcgagcaattagatgcgcatgctctaattcggatacgggtacaaaaaatcggtttttctacgataacatgtttttcatttttcagtaagctaaccgcatgttgataatggagcgcattaggagaagcaatgtagaccgcatcaagtgcatctgatttgcccatttcttctatatccgtgaaataagtcaagtccccatatttttctccaaatgcgcgtgctttttcttctgtgcgcgaatataccgcagtaagattccattcacctgaattaatagcaccttcaataaaagaatccgtaatccagttcgttcccataattccaagtttcattagccaacagctcccttcattttatcttaagtataccttaaaataaggaaaaaagcgtactaattgtttgaaacagatggcccactgattctagtagtatagattatttcgttttcagcttttccaccttcaaggagttccactagtttatctgcggcaactgcgccccatttgtacttcgagtattcgatagtagcaagacgtggaaccaaatactcacttatatccgtattatcaaagccaataattcgtacgtctttgccgatttccaaatctgtccctgcaaaataacgatacatcccaatagccatgttatcatttagggcaaatacagaaacaggcgccttccagttttccgtgataatggctgctgctttttcgccactttcttcggaaaagtctccttcaataatatgcacctttttgtcacctgaccgagcgagttcttgtttcgcggtttcgagcctgactcttgcatcataagaatcttctggaccggtaatgacatagaaatcacctttaaaattagtagataaataatcaattgctagcgttgcgccgcctttattatctagaaggacttggctcacgttctcatgggtaagttcgcggtcaagcaccactaatttatgaccacgattagcataattaatgatttcgctagacgggaaattcgcatctaaaataatagcgccatcaatcattttctcgggtaaaaatcggtgtgttttcgtgccactgcaagcgatgagttcatatccatgtttatatagcgtttgcgttaaaccttccagtaaagtcccgtaaaaaatcccgccgtaattcgttaaatagacgccgataatttttgtttctcttgtttttaacgttcgtgctgccatattgggaatataattcaattcatttgcgatggtcataattcgttttcgcgttttttcggtcactttcgggctgccattaagcgcgtaggatactgttgaaatggaaacccctgcctttttcgcgatatctttaattcctaccacgtgaatcgcatccttttctgttttcttttattatacacaaaacaaccttagagacggttattttttgaaaatttaatcgtgatttgtgaacattttgtcgttaaattctttttcggtaaaacgagtgcgccagttcggtacaaattcgcttcattttcaactggttgtttttcaccattcacgacaatagaaccctcatccgcactttcgaaagtaagatcaagcggataattatctagttcaatatgacattctaatccatctaattcttcaggtaaaattggatcaaaaataagcgcatcttccgtttggcgaataccaagaacagaacttattaattgatgtaaatagattcctgggccactagaataaatccgccagccgcctttcacaggaatactaccttcttttacacgactaaactcattttgcgcctgatagcgatctaaaaacgctgcatcagaactactgaaataagtattactttgacgaagtgccgcatttgggacaacttcttttatgttgattggattaataacatccagcatatgccaagcggatttatcgccaatttttgctaaagcttcaatataacgaatatgcgcgtgcacatattgcaaaccgacttctcgaccaaaattggctgcttgctctgcccgtttaaaatgagtacttacaccaccagcataatgcgctggctcactcattaatcttacgccatcaggatgaagtagatgctcaccaataatttcaaaattgcgactggcttgctttttatcgactaattcagaaattacacttctcgtcagtggtattaagcgatatttaatattcgtatctttgtcttctgggtgaatcatccatacaggtgcttttccttcttctaaatataggaaacctggaataacatcagtatcatttgtcatatatttcgcaaagtccgcttgaacattgtttgctaatgtttcgtatttctcacctactggcaaaaatgcagctaaacgtttaaatgtttgatatgttagcgcgaccgtccagctggacaccatgtttttcttcagctgggcattagctggttgaagtgtgtcatcccagtcaccatcgccgtaattagaaagagccgttcctttcataaagcgggcttcaatcgtttctactgcaagttcgatgtgttcaagaagagttccttgctctttcgtaaaggttttcgattcgcgatcaacaaaaggaatagcttcttctaaaatccctgtatccccgctcatttccatgtaatcaccaataattttcagaggccaaacaataacatcgccatggctttcttcttgctgaatcgatgtatatttatcaaacataaaccattgtggccaatcaccagtatcttgatattgatgagaaaaaatcgtcaacactagcttacgtaaaacagctttattgcctgttgcaaggaaaaattcaaatggaccttggctcacatcacgcgtaccccaggccgccccgctgtactgttctaacccatgtggtgaagcatagtgaactaacatttggtgcgcgtaccaataaaccgttaagttcagtttctccgctgttgtactttgatgatttaaatggaactgcgcagttaattcgtcatagctagcgcgaattactttgttatttgcttctaaatcctccgttggttcagaaaattcatcagtgagttttgcttgaacgtggaaagtcgctttatcacttggttcaaaaacaaacacatc

SEQ ID NO: 3755 - DNA, 4403 bp, Listeria monocytogenes 4b
  misc_feature (1)..(end): n can be any nucleotide: a,g,c or t/u
gtgctccgaaagtattaattaaaaggagcggaattatatgttagaagtgatgagttcaaaatccaagagacgcttacttagcggaaaaatacggcgcgaatagaatggaagtagtttcagcaataagcgaaggcggtttgactccaagttatggtgctattaaagaaatcgtacgtgcctctaagttaccagcgatgatgatgattcgaccacatagtttttcttttgtctatgataaggcagccagaatagtcatggaacgagatattgagcttgcaaaagaggttggtgtgcaagggattgtttatggtggtataacagaaaatggagaaatcgatcaagctcttctcgaaaaagtaatagaatggaaaggtgatttagacttaactttccaccgggcgctggaagcaactaaagatatcgaagcgagttaccaagttttacgtacatatgggaaagacatcaaccaattattaacttcaggtggtacagcaaacgcacttgactctttgccacgcctaaaacgctggattcaagatagcgaagcacagccagattcattccaaattttagttggaagtggcgtcaaaccagaaaatatcgcgaccttccaagcgacattaaatcatagcgactaccatgtaggaagtgcggctagagaagccaatgatttttccaaagacattttaaaagaaaaaatcgatattttacagcaacaaataaacaaagattgattcttcgtagcaggtagccttacaagcttagataagctataatgaaacaagactattcttaaggaaaaggtggaaaaaaagtgaataactatattggcaaaagccaaataatgacagtgaaagaaatcaaagatacaggatggctccttgaaaaagacggagtaactgtttttttatctaaatcaaatacacatgaaacggaacttgctgttggagcagaagtaaccgtatttatttttgtggactatgaccgcgaaattgcagcaacaacgattattccaaaaattcaagtagggcattacggctggggaacggtgacagaagtacgtaaacatttaggtgtttttgtcgatatcggcattgaaaaagacgtggtggtatcattggatgacttacctgcattaccacacttgtggccgaaaaaagaagatcgcgtgatgattgcgctacgtgtggatgaagaaaatcgtgtttggggcgtccttgcagaagaagaacaattccgcgcaattgccgttcgtgcagaacaagatctatttaaccataatgtcgaaggaactatttatcgtttattaaaagtcggttcatttgtttttacggatgattttcatattggatttatacatgaaagtgaacgaacttcggaaccaagaatgggcgaacgtgtgaaggctcgtgttatcgctgtaaaaccggacgggtctcttaatttatcgcttcgtggtagagcacatgaagtattaaatgatgacgcggaaatgattttaacttatttgcgaagtgttggcggagaaatgccattcggagataaatcagatccagatgccattcgtgccaaatttggtattagtaaagcccaattcaagcgtgcaattggtacgcttttaaaagcaagacgaatcactcaagagaatggtgtcgttacaaaaataacggaagaaacatcggactaaagtagtaggggatgttccaactagcgcggttgtttcaatcagtaaatcctcgctataattaacacagcatgtacaaagtagcaaaaatcgagaaataactttgtcaaaagaggaacgtaaggaggtgtgtcagcttgaaaaaaatggaaagctcggttgtttttgtatttttaattgcgattattgttggcgttggtttggagatgctgttccagtgggagttgcttattttatttgcactcgggatattttttatctttacatcaaggaaggcaagcgcaacaaagaaaagtgcaagaaactcattatttattggtatcgtatttatcattatcgccgtgttacttacaaccacgtttaaagttgggcttgttgttgcaggtatttatgcgatcattcactacattagtaggaagcgggcaccccaattattgatgctcaaaacgagagaacctgacagcaagattgaccgtacggataagtttattcgtaatcagtggttcggtaaccagcgtatacttgatgtagtgtatgaatgggatgacatcaatattcaaacagggattggtgatacgattcttgatttagggaacacggtcttaccaactggcgaaagtgtcattatgattcgtagtgtctcaggaaaaattcgggtacttgttccatttgatatcggtatttgcattgaacattccgcaattttcggaaacatccaatatgataaagaaagcacctctattcaaaataatagcatcaaggtctactcagataattacgaaagttccgcacgaaaagtgaaaatcatgacttctgtaatcttcggagatttagaggtgattagactatgagtttttcgaaactgatgatggctgtttgctcagggttactacttgttgctacagccatcggtacggtcggttactatttttttagtgaaggttcttggtataaaattctcatcgaacaaaaaatcttttacattccctttgtggttttcgttccgcttacagccatttcgattggtttaattataggcggtttgctcgggtattttgttaaacaaaaatttgaatcaattgacttctcgattcggctgctcggacaaggcgatttggagaaaaagattacgagtgaagaagacgagaactttttagaagtgcagcaagtatacaagcaaatcgaccgcttacgtgataaaatgaaagcacaaacgattttgacacaaaaacttgcaagcgaccgtgctgaatcaactggccaaacgaaagaagctattttgtcagaagagagacaccggattgctagagaattacacgattcagtgagccaacagctttttgcagcaatgatgcttttatcagctttgaatgaacagagtgaaaaaagcgcaacaccggcgatgcaaaaacaactaaaaatggttgaatctatcgtaaatgaatcccaatcagagatgcgggcgcttttacttcatctgcgtccaacgcaactcgagggtaaatcattaaaaactggtattgagcaattattaaaagaattaacaaccaaattgccaatcgaagtagaatggcaaatcgaggatattagtttgcaaaaaggcattgaggatcatttgttccgtattgttcaagaattactttccaatacattacgacattctaaagctaaattattagaagtacgcctcgtaacgatggataatttagcggtgatgaaagtagttgatgacggcgttgggtttgatatggataatgttcgacaaggctcttatggattacaaaatatgcgagaacgagttgctgaattcggcggcaccatcaaaataattagtttcccaggaagaggaactagtgtagaaataaaaatcccacttgttgcgaaaaaggacgtggaaagcgactgataaaagtattacttgtagatgatcatgaaatggtacgtataggtgtctcagcttatctttctgtgcaagatgacatggaagtggttggcgaggcagagaacggtcgtgaaggggctgatatggctctagaactacgcccagatattattttaatggatttagttatggatgaaatggacggcatcgaagccacaaaagaaattatgcaaaactggaaagaagcaaaaataattatcgttacaagttttattgatgatgaaaaagtatacccggcacttgaagctggagcgagcagttatatgcttaaaacttcaacagcgagcgaaattgcagatgcgattcgagctacatacggcggagactctgttcttgaaccagaagtaactggcaaaatgatgcaacggctaaccgctaaaccagagaaaaacttacatgatgatttaacgaatcgtgaaaatgaaatcttacttttaatcgcggaaggtaaatccaaccaagaaatcgcagacgaacttttcatcactttaaaaacggtgaagacgcatgtaagtaatattttatcgaaattagatgtgcaagatcgtacgcaagcagcaatctatgcatttaaacatgacttagtagaaaaaaagtagcaaggaggtaacgtacacatgaaagaaggatttgcagtcatcggtcttgggcgattcggcggaagtatttgtcgttcacttgtcgagcaaggaatggaagtacttgcgattgattcggatgaagaacgtgtcaacgaatatatgtctattgcgacccatgcagttatcgctaattcaa

SEQ ID NO: 3756 - DNA, 4480 bp, Listeria monocytogenes 4b
  misc_feature (1)..(end): n can be any nucleotide: a,g,c or t/u
tgttgcaagatgagtgtatcataaaaagcccatgtataacccaaaatgtaaaggaaaggtttaattctggtcaggaataccttaaaactggctttatttagatttattcttacacagtatgggtaatatctccatttcaataataaaatcttacacaatatgaagcactattcactttttatgcaatcaatttttcttcgtcacaaaaaattcgtatttactactataaaataactatttaaccgctaattactacctatttgttttattatttcacattaattataattcacgaatgaataattattcaagcactccttccaaataacaaaaaaaagacaggaaactctcactatctgtttcctgcctctttcatttcaatctatataccaacattacttaattttatttccggaataacaaattcaacaaatcttccatggagcatttcgatttcttcactgaatttcgtgtcaaaacaaataatactttcttctaagcggagcactgcaaagccatcttcctcgtaatcctctaacttcccaattacgtgaactaagccttcttcgtctatttctaatgcacaatgtttctcttcactctcgtgtagcagttctgcgctaatcatgtccggtattgtaatttctactgtgtaaaccctacttggttctgggtcttcatcggcccatataccaacgcattcaccatattcactactaaaagcgattctgccgtcagtcaatttcttttgaacctttatctccactaaccatttcctcctgcgcttcaaattcttgctttattatagcacaaaatagaaaaggacgttaatttttagcaaagtattttcactttttatttgtcatttgtattgtttaaaagtatgataagtatatacttttctataaaaaggagattgagtaatgacgatacttgcatttgatttaggtggaacagcagtgaagtttggcgtgttaacaacagctggagaaattctagaaaaaggtaaattcaaaaccccggataatttggatgaaatgctgcaatcgcttatggatgtaaaagcaaattacgattatacattacaaggagctgcgtttagttgtccaggtgcggttaataatgaaaccggtatcattggcggcgcgagtgctatcccctacatacataatttcccttttaaacaattacttgaagaaaaactggggcttcctgttacgatggaaaatgacgccaactgtgcagctttagcagaggtttggattggcgcggcgaaagacaagcaagatattatttttatgattcttggaagtggagttggtggcgcagttattcgcggtggcaaggtacatcacggggccaatttgcatggtggtgaatttggttatatgttgatggaccgcgacggacgcacacttagcgagcttggtacagtcgtaaatgctgcgacgagaatagccgagcgtttagaagttccaaaagctagtatagacggtcttcgggcatttgaattacgtgcggaaggaaataaaatcgcaaaagaagagctagatacgatgttttattatcttgcgagaagtatttttaatttgcagtacacacttgatcctgaactagtcgtcattggtggtggtgtaagtgagcgggctgattttattcaagagttgaccgaatatgtggcgaaagtaaaagcgtctgtaccaattgcgactattagccctactgttgttggctgtcactttggaaatgatgccaatctcattggtgcaactgcatttcatttagcataaaaaagaagctggtcacttttttcgtgccagcttctttctatcctaatttttctgattcaccgcggctttctaatacttcagaaactgcttccagccactttttctgtttgtttacaacgaattggtactttactccggatatcatgtctatttctaaaatgttggagagtaattcttttccaaggattttggtgcggacaccccgaatttttgctactcgattcagcggaatattgatttcttcgtcaaagtaatcatttggtttgtggacaatatacgttgctgttaaataaagttttccggggactgctttaaaaccatttttcgcattggcaagacctttatgaatgacttctaattcttcttccataaagctttcatctccttattcttctacaattattgtaggttactttttaagtatgaatgggccgaagcgcttcttgctgctttttttgggtgcaagaatattcaagtgactgccaagcacttcgatttctgctggtacacctggacctgggtcgccatcgacgttgatgcttaaatcgtctccacttgcatcaatggtaagtttcttggttttaatataaactacaccgtcactgttttttaaattaccgcgaattaattgcgggatcatgttagctgcatcgagcaagccaagtttcgttagaataataatatgcaggtagccatcgtcaatttttgcatctggcgcccatgattccatcccaccaactgaattagttaagccagccacaactagcgcagcttccccttcccaaacttcctcgtcatattcgattttaaaatgaagtaattcattgcggttaaatgctttcaggccttctaaaaagtatgctacggagccaaatttggttttttgttcgacgctaacttggtcgacagcttgcgcaatcataccgatagctaggacgttcataaagtattggtcgccaatccggccaatatccatcggcactgcaatagctttttctaatgcttgaatcgctttttcgggttttaatggtatacctaccgaacgagccaaatcattgactgttccaagtggaatgaagccaaagtcaggtcgtttttcatggattgcaagtccgtttatggtttcatttaaagtcccgtctccacccatcgcaattactgcttcaaagccttgttcagcagcccaggaagcaaattctgttgcatcccctgctttttcagtcaggcgaacttccacctcatcataacgtttttttagtacttcttctgtctttccttgataagtttttcctttttctttacctgatgatggattcacaatcaatagtgccttccccatcgcactcaccctttcttgccaaaaaattctatttataaatttacacaaaatatcggcatcttctctattctagtttaccttgaaatggggatttgtaccagtcacagccttgtaaaatggcgaaaaaagtcgtaaagtgaaggggaacacaaaattgagttgtggaggaatttaaaaaatgaaatcatttcaagcacttttcattgaaaaagaagcagataatacttcccttcattttagagaaactactatagataacttgccagaaaatgaagtaacgattgaggtacattattctggtattaactacaaagatggactggctgtacttccagacgggaaaattgtgagcgagtatccttttattcctggtattgatgcaagtggtgtggtcgtccattctaaatctgaccaatttcaagtaggcgatgaggttattgtcactagttatgattttggagtgagctattttggtggatatagtgagtttattcgcgttccagctgcttgggttgttcctttgccagatggtctatcattaaaagaagcgatgatacttggcacagcgggcattacagcagcactctcggtcgatgcgcttgaatttagtggcgtaacacccgatgctggaaaaatcgctgtaagtggtgcaacaggcggtgtaggtagtttaagctcagccatactttccaaacgaggcttctctgttgtagcttcttctggaaaaagcgatgcaaaggaattcctagaaaaattcggtgtatctgaaatagtttcaagagaagcttttcaacctgaaaaagtgcgcgcattagacaaacaactatacgccggggccattgactgtgttggtggaaaacctctttcatacctcctaacagctgttcaatatggcggggcagttactacatgcggtatgtctgctggtggaaaattagatacaactgtctttccatttattttgcgtggtattcaattattcggtattgattcagttttatgtccgatgccaaaacgagaacgaatttggaatagacttgcgacagatttcaaattaactaatttagaaagcttagtaacagaagtgggcttttctgagttacctgaagctcttcaccaagtaatgaacggtggcgtgactggtagatatttagtgaaaataaaataaataaaaagcattgtccttaagtagtaaggacaatgcttttttaacgataagcgactaaaacatgggcatcaatgacttgatcaataatcgctatgcacttgtcataatcttgtacatccaacgcatcaataaaacgttggatgttagcgattgttttaacacaagcgttttgtgcaatcttaa

SEQ ID NO: 3757 - DNA, 4327 bp, Listeria monocytogenes 4b
  misc_feature (1)..(end): n can be any nucleotide: a,g,c or t/u
ttaaaggaaatgcggccattgctaaaaatacaagtagcggtaagcggattctaggtaaaaatgtcacagaacctggagaactggctggggagatttattatttctcgcatcgcaatccattttgggactatgtaatcgtgcttgaaccgacaacagtattagaaattagcagcatcgaccaagaaactcttcaaaccttagatttagctttacaaaaccaactattagtcaatttattaaaaagtgttactagaaaatttgaatatataggtgaaaaggtacgaatggtttcagaagactctgttcgtgcaaaaataagcaattatttatttggcatccaagacgatgatggcagtatcgaattaacagaaacaagagaagaaattgccgactatcttgatattacaagaccttcactttcgagagaacttggcagaatgcaaaaagaaaatattattcgtatcgaaggaagtagcgttattattttagatgcgattatatttgatacttttattgagtaactagtaaccagcgttacatcttttcgtatgcggtaatggtaagctattcgtattaaaagaatgaatacggaggagattagatgttattaactagaaacgaaccttttaccgcagaaaaaatacaagcaaagacagacatccttgagctagttcaatttgaacgattttgtcgcgacaatgcactttgggatgaaatggaaacttgctttacaaaagattcaaacgtaaaaatttcatggtttcaagggactggccatggctttattgaagcatcaaagaaaatgaccaatcctgcgccacataaaatatacaatacgcaagtttggattaataacgatcgagctgtggcaattatgcaagccactatccaaacacgcaccatcattaatggagtagaaatggaactcaattctgacgccaaattagtcacacgagttgagcgaatcgaaggcagatggtatattaatgcgtttgaaggagtttatgagaaagactcgttgatgccaatcattcccagtaaacttgcagatgttcctgctgagttgttagctaattttagaaaaagctatgcttgcctagcactttcattaacattaaacggttatgagattgataataatcttcccggcattgatcgcccggagcaagtggctcaatttttcaaagaagctgatgagtggttgctccaataatttaaaaaggatagctagtttttactagctatcctttttaaatgaaggagtctcattttaaaatatgctatacttagtgaaatataaacctcatgaaacggtaggtggttgtcagtgaaaaagagtaagacggttcaaattctattagttttttccgttgttgcgttaattttgagcatggttggggtggtatcaatttggtatgggcagaaaaatcatcaaacgaataatgcgaaaaccaccgccaaaaaagagacgacagtaacgaaaaaacaagatacctttaaaataaccgcgctcggtgactcacttacatatggcgttggcgatacagaaggcggcgggtatgtccgagtggtggagaatttctacaaacaaaaagagaaaaatgtcgagaatgtcaatcttgctattagtggggcgaaatcagaccagcttctcaaacaattagatcaaaaagaagtgcaaaaccaaataaaatcagccgatgttattttaatgacgattggcggaaatgatttgtttcgtggcggagaagcactggatgatttcaaaagcaatgcaattaaacaagccgaagcaagctatacgaacaacctgaaacaaatttaccaaacgatacgaaaattaaatccatccgcgcccgtttttcatattgggctgtataatccgtttatgtcattaaaaaatgcgagtgaaatgtcggcagttgcgaatgagtggaacatgcaaagtcaaaatctatcgcaaaacgagaaaaatatcatttatgttccgacttttgatttatttcagcaaaatggggatgcatatttagcgactgataaattccatccaaatcacgccggatatcagtttatcggtaatcgggtgacagaggttatacaaacgggagggggaaaagacgatgacggagctagcacttcaagtaactaatctgcataaaaaaattcgcaaacgagaaattatcaaagggatttcttttgaagtaatgcccggagaagtttttggctttcttggaccgaatggagctggcaaaacaacgacgattcgaatgattgtggggctaatcaaaccaacatctggaacgattttaatcggtggaaaagatattcgcaaaaattttacagaagcaatgcgaggtcttggctcgattgtggaaaacccggaattctatacatttttaacgggacaagaaaatttagcgtattttgcccgaatggattcgtcgattaaaaaagaacgcatccaagaagtaaccgagctagttgggctagaaaagcggataaatgaccgagtttctacgtattcacttggtatgcgccagcgtttaggcattgctcaagcgttactttcgaatccgaaattattaattcttgatgaaccaacaaacggcttagatccatctggaattcacgaaatgcgcgactttatccgtgctctggctagaaatgaaggtattagtgtacttgtttcttcccatttattaagtgaaattgaacttttatgtgaccgagtggcgattatgacagatgggacgattattaaaaccgatcaagtttcacatcttcttagttctcgtgcgcaattacgctggctggcgactccttttgaacaagccaaagcatttttggaaagtgtaaccgaagtagaagtggacggcgaatatctcgtgaccgcagtgaatgaacatagcgccgaatggaacgaacagttggttgcaaaaggcattcaagtccatgaaatcgacaagaaaaaaccatctctcgaagacctatttcttgagttaacaggaggtcatacgattgattaatttagtttataatgagcaattaaaactttggcgcaaaaagcgactcattgttattttggcgctagtggcaattatcgtagcgattttcacgtatgcacagttccggcagcatcaagaagatgaaaagcaagctgggacaagcgattggcatgtgcaaacccaacaacaaattgttgaccttgaaaataggctcggaacagggcgactgccagaagaatatcaaaaatatttcaaagtgcttgtcgggcaactacaatattatttggataatgacatcaacccaaatgcacctggagcaccaactttcctaaaaacgtttgtcgaaaatggtattagtttattgtttccgctttttatcatggttatagcggccgacttaattagtgctgaaacaagtgcgggaacgatgaaattcctgctgacaaggcctgtgaagcgatggcggattttgacgagtaaatatatttcaatgttgctttcgatttccgcgcattatggtattatccgctgatattgcctatctgatttctggaattgtgtttggttacggtggctgggatgcgccagttctcaccggatttggcatgaaagatggtgctgttacaacaacagacgtgtaccaactgccggtttggcaactactgctcatggagttcggactcgcgtggtttgtcagtgtcgtggtcggcgtgttaacgatgtttgtatcggtgctcgtccgctccacagctgccgtaatgggaattatgcttgcttcactcattaccggaaccattttaaccaacctcgtcagctcttggccgagcgcgaaatatttatttatgggtaatttacaactaacgaattacttaaacggctcgagcccacccgctgaaggcatgacattgagtttatcgatgctcgctctgaccgtgcgcatgctagccgcgccatcttatcctattgtattctgaccaaccgagatgcgtattaaagagcgctcaatgtccctcttttctgcgtccatcttccgtctcctacctcttgcctatccttttcctccctcgtctcacccgcccgacctcgcgctttgcgcttctattttgttgtcttgttcctcagttttcttcaatgtcacgttgaattgtgntgctgtgtggtccttccgcttctcctcccttccccctcactctctccccctcctcccccgctccttcccgtcccttttccttttgtttcccgtgtgtcctgctcttacctcctctctctattatccgccctcaccctcgtttcctactgtccttctctacaccctcgcgacg

SEQ ID NO: 3758 - DNA, 2541 bp, Listeria monocytogenes 4b
  misc_feature (1)..(end): n can be any nucleotide: a,g,c or t/u
accagtagtacaggccgccagtgtgtctggaaagaataaattaagttggtaccgcgtgaaattcgctcgcccttattccaagatatttttttggataagggcgagttttattttaccctaaattgctcgaaatggaggatttcaaaatgacaaaacaactacttgttttacaatctgattttggtattagtgatggtgcagttagcgccatgtacggcgtgattaatagcgttagcctagatttgcaaatatacgatttaacgcatcaaattcctcaatttaatatttgggaagcatcgtatcgtttactccaaacggttacttattggcccgaagataccatttttgtttcgattgttgatcctggagttggttcgaagcgtcgaagtgtcgccgttttaacagaagatggtcattatattattacaccagacaacggaaccttaacccatatcgcgcattacggaacaattaaagaagttcgactgatagatgaagaaaaaaatcgcctaccaaaatcaggtgcatcccatacatttcacggtcgagatattttcgcttataccgcggctaggctcgcagccggcgtgattaattttgaagatatcggtccatcagctaccccagactccattgtttctctaagtctaagtgactcctacttagaaggcgagcaagcttttggcacaattgatattattgaccgtccattcggtaatctttggacaaatattcgccgaactgatttcttgcagctaggtgctaactatggcgattccatcgaagtcctcatcaaacaccacgaccgagtagtttataagaatttcgttacttatagccgctcatttgccgacttacggattggcgaagcgctcatctacgtcaattcactcgacaacctcggactaggtatcaatcaaggctccttcgtagacgcttattcagtcggcaccggcaccagctggaaagtcacccttaaaaaagtataaaaaaacagggtcaaacatccaaattggaagtttgaccctgtttcatttttttatttcgtatattctttgacgattggctcttgttttttggttttcaggaataaacttaagatcatcccaatagccgcaaaaatcgctgcaaccataaacgccgcacgcattccgtccaagctagcatcttgcgctttttgagcaaaactagccggatccgttgccataagcgctttacctggcatattatctttcgttacattcgttagcactgtaataagtaccgccgtcccaatcgaaccagcaatttgtcgaatcgtattatttaccgccgaaccgtggttaatcaaatggttaggaagtgcattcatacccgctgtcgaaactggcatcatcgccattgaaatcccgaagaacctcacagcataaaatacaacaatataccaaagcggcgtatccatcgttaagaacataaatggaattgtaccgatagtcaaaatggtaaccccggtaatcgtcaaccatttcgccccaattttatcgaaaataatacccgtaatcggactcattatccccataataatcgcacccggaagtaataacagacctgattgaagcgccgactccccgcgaattgtttgaatataaagtggcaatacaatttccgcaccaatcattgccatcgttacaatcgaaccaagaataacagacaatgaaaatactggatatttaaacacatgtagttcaagcattgggttatcaataactagttggcgccaaacaaataatgcaataacaacgacaccaacaatcaacatcgtgataaccgttgcatctccccaaccatcattacctgctgaactaaatccataaaggagtgaaccaaaaccaattgaagacattacaatggaaagaaaatcgatttttgtatcagttaattttactacttttttcattccaaagaacgctagaattatatcgataaccgcgattggaattaaaataaggaataatacgcgccaatcatacgaatccacaatccaaccagacaaagttggcccaattgctggagcaaacgcaataacaagtcccatcagccccatcgccgccccacgtttttcacgagggaaaatcagcaagaagattgtttgaagcaacggcatcataatccccgcaccagctgcttgaacgatacgaccagtaagtagtaccgggaaagaacccgccactgacgcaataatggtaccaattgtaaatacagtcatcgctgtaataaataatgtttttgaactgattttttcaattaaaagtgccgtaatcggaatcataatcccatttgttagcaagaaagccgtcgtcaaccattgccctgttgctgctgtaatatgcaaatcatccataatcatcggcagtgccgtcgctagtaacgtctgattcaagatcgccacaaacgccccaataatcattgtaactactaataaacttctactataagatttcccgttaacatcaacgggccgttctactgctgtactattcaaaattaataccccttcccatg

SEQ ID NO: 3759 - DNA, 3558 bp, Listeria monocytogenes 4b
  misc_feature (1)..(end): n can be any nucleotide: a,g,c or t/u
atgccttgcgctgcaaacgcgatgctcatagatgaaggaattccagttgtttgtgaaacagatattcatggagcaatttcttgtttattaatcgaagcggcaaatttgggcagaaataaaagtttttttgcagattggactgttagacatccagataatgagaatggtgaattgctacaacattgtggactgtttccgttttctgttgcaaaagataaaccggcaattggctatccgttagcatttgattcacctggtgcagtcgaagcggaagcgaaaggtggcgaattaaccttatgtcgttttgatggtgataatggcgaatattccttgttactgggtaaagcgagaggtattgaaggtccgtatacaaaaggaacatatctttggattgaggtagataatttgaaacgattagaggaaaaaatcgtttcaggaccatatattcatcatgttagtggtatccatgcagatgtggtccctattctttatgaagcatgcaaatacattggcataaagccagacctctatgatccaattgaagaagatataaaagcttatttacgcggtgaatagagaaaggagtaaaaaatgagtgaattaaagttaaaatcgtttgaaattagaaaagatgttctaaaaatgatatatgatgcaaaaacgggacatactggttcagatttatcatgtgcggatattcttgtggcgctttactatggtgtgctgaatgttaatccggaaaatccagaagctttagatcgtgatcgttacgttcaaagtaaaggacatgctgtcgaagttctttgggcagttttagcagataaagggttttttgcaaaagaagaattggctgatttctccgcatttggctcgcgtttaatcgggcatccaaataataaagtagctggaattgaaatgaacacaggttcgctcggccatggtttatctgtttcggtgggtatggcattagctgctaaaatggatgggaaaagttatcacacctatacactcatgggggacggggaacttgcagaggggtctgtctgggaaggtgcaatggctgcagcaaattataaattagataatttgactgcgattattgatcggaactccttacaaatctccggtcgaacagaagatgtaatgagtgtagaacctttggcagataagtggcgcgcatttggttggaatgttatcgaagtggatggaaatgatccggataagctacaagcgatttttaaaacagttaatgtgactggaaaacctcgtctaattattgcaaaaacgataaaaggttatggggttaaaatggctgaaaatgctgctaaatggcatcattacgtaccaagcagtgaggaatacgaaatagctatgaaagatttagaggaaagaatggaggcgtgccgtcatgaataaaatagcgaaccgccaagtaatgtgtgaagttttaatgaaagaagcaactcgtaacgatagtaatttagttgttttaacaagtgattcaagaggatccgcttcgctgggggcttttgctgagaaatttccagagcgactagttgagactgggattgccgaacaaaatattgttggaattgcagcaggcttagcacatagtggcaagcgagcttttgtcgcttcaccagcatgttttctaagtatgcgcagtattgaacaggtaaaagtagacgtggcttactcagacacgaatgtaaaattgattggtatcagcggtggtgttagttatggtgcacttggtatgagccatcattcgcttcaagatattgctgttactagagcgattcctaatttagaagtcattctaccagctgatcgtctggaaacggaagctgtttttgactatttgcttcaatcaaatcggccggcgtacgttcgtcttggcagaaatgcggtagaagattgttacgcagaaaaaccagtatttcaaattgggaaagctggaacccttaggaaaggaaacgatgtgtcaattttagcaactggtgaaatggtacgagtcgcacttgatgcaagggaagaattgaagttgaaaggaatcagcgcgcgtgtattgaatttttcaacaatcaaaccatttgaccagggagctgtagaagcggcattagctgaaacaaaactacttattagcatagaagaacatagtatttatggtggcttaggtgcagcagtgagtgaagtggtaagtagttcgccaacaagtattcgtcatttgatcttaggaattccagatgaacctgctatcgctggaacgagccaagaaatctttgattattatggcttatctgctactggtattgttgctacagttatgaaaaaccttggagacgaaagaagatgaagaaacactatcaaatcgctattgatcaaagcacatctggaacgaaagtattattgtttaaagcaggtgaacttgtagatcgtttagataaaaagcatcgacagttgtatccgaagaaaggctgggtagagcataatccaatcgaaatttgtcaaaatgtccgtacattaattgtggacatattggcaaaacatgatttaattccagcggatatcgagcgacttgctttgacgaatcaacgggaaacaattgtagcttgggataaacaaacgggcaagccactttataatgcgattgtatggcaatgtaatcgaacaaaagaactttgcgaaacattaaaaaaagctggttatgaaaaaagaattaaacagcttaccggattgaaaattgattcttatttttctgcttctaaaatgaagtggttattggaaaatagttctgcggtgcgggatgcagcaagtcgtaatcaattggcatttggtacaatggatgcttggttgttattttcgcttacggatgatagtaattatttcacagaccgaacaaacgccagccgcacactcctttatgatattgaaaaaaatgattggtcagatgagttactcgaactttttggagttaaacgtgcttatttaccagaagtgaagcaatctgctggaagttttggaagttatcaggagataccgattcatagtgtgatggctgattcagaagcggcactttatggacaaggctgtgatgcatttggggcagtgaaggcgacgcttgggacaggatgctctgttatgatgcaaattggtgagaacagattacctgaaaacgatgctattttgacaactcttgcctgggatgttgcaggcgtgaaccagtttgcgttagaaggaattattcgttcttgtggagacacattggtttttttatccgaacaattagaactatttaatgattacgatacagcttgtaagcgagcatttcaattaccatgcaatgagggtgttgtgctaattcctggacaattaggtttaggttcgccttattggaatacagatatacgagcagagattcttggtctcacacgagaacatacaaaatggcatattattcgtgccggttttacaagtattgcatttcaaattaaggctgttattgaccaaatggagttaatgacaggtcaaaatattaagcgcttacaagtagacggt

SEQ ID NO: 3760 - DNA, 3318 bp, Listeria monocytogenes 4b
  misc_feature (1)..(end): n can be any nucleotide: a,g,c or t/u
ccacttcgggtaactgacagctgcttgatgggcgcacagtgcgctggaaatttagcctctgtgaaagaagctttagatgatggactttgacgtttatatattacagatttcgcgacaaaagaattactaaaccacaaaaaagtgcatgtatttcctcatttaggtgcatcgacggaagaagccgaaaccaactgtgctaaaatggctgcgaaagaactgcaatcatatcttgaaacaggtagtattaaaaactcggttaattttccgaacgtggaaatgccgtataatggacatccgcgaattggaatttgtcacaaaaacattcctaatatggtcggacaaattacgacggagctagggaaatattcgttaaacattttagatatgataaatcgcagtaaaaatgaatatgcctacacattaattgatattgataaggaaacgcaagctaatttggaacaactgaaaagtgatttattagctgtgcaaggggttttgcgtgttcgagttattgaaccattaggtgttacggtttaaaattattacccgggaaataatgagagcatgaaactttatggttattgccagacgggttcatgctcttttactaaaaaggaggataacaatggtaaatatacgtccatttaaagcaattcgtccgattaaaaatttagcggaaaaggtggcttccttgccatatgatgtacttaattcggaagaggcgcgcgaacttggtgatgcaaataagtattcttttttacatattgataaggcggaaattgatttagatccggcggtttccccttacgacccagctgtttatcaaaaagcagcggataatttggaacaatttgagttggatggttggcttggtagagaagcaaacccggcattttatatttatcaactgacgatggatggtcgcccgcaaacagggctggttgtttgtacgtcgattgatgattataccaatgggaaaattaaaaaacatgagttaactcgtgaagagaaagagttagaccggattcgtcatgtagatgtttgtgatgcaaatacaagtccgattttccttacttatcgtggaaaagaagcaattaatgcacttgttgagtcttgggtgaatgaaaatgagcctgaatatgactttgagagcttccacggggtcgcgcataaggtttgggcaattacggacgcacatattttagaagacctgtcagcggcgttctcggaagtcccagcgctatatatcgcagacggtcaccatagaacggaatctgctgtgaaagttggtttgaaacggcgcgaggaattcccagaggctgggccagaagcagaatttaatttctttttatcagttgttttcccagaagagcaattagaaattcttgattataatagggttgtgaatgtgccaattgaagcggatttccttagcaaagtagaggctagttttgacgtggagaaggttggaaaagaagcatttaaaccagagaagccaaaacaagtagggatgtatttagatggaaattggtacaaacttacggcgaaaagcgaagtgattccaaacgatgttattggtcagctggatgtttcaatattacaatcgcaagttttaacgccaatttttgggattgaagatattcgccgtgataaccgcattgattttgtcggcggaatacgtggactgagcgagctagcgcgtttagttgataatggcagtcattcagtggcatttgcgatgtacccgccgacaatggacgatttacttagtgtagcagatgccgcagaaatcatgccgccaaaatcgacttggtttgaaccgaaattattaagtgggctgtttgtccatgatttagaaagtaaataattttaatatgaagcaaattagttacttttattctgaggaaaatgagtctgagatcaaccttgagatatggaaagtgtttatgaataaaagtgaagctgagcgaaaaattcattttgattatacaggtattgtgtttgatattaagctgggagaggtcgggaaagtggacttgccagagcgggttcaaatgctgattgataaaaatggaatggaagctttgccgattttagttgtagatgatgcagtatacaattatggggagttttctgtgattgatgcagttgaggaattactggatgtgggtgtttctatccaagtggaagaagattgaaatcaaaaagccggtcgggaaattaatcctgaccggcttttttactattttttctttttccagataactagagctgtggatgataggaataccccaagtagagctgatttccatggtgcggaatcgcctgtttttggtagggtatctgaagcttttttcacttcggttgtctttaaattagacggtttcgttgtttttttatctggtaaaggttggtcgatgtttgtgtttttcgtgtaaatgtagttgacagtttgtgcgctatttgtgaattgtccagtcgcattggttggttcggcggataatgtgtagccgtcgatttgtttggtggttgctttatatgtgtcgccaatagttccgtttagggtttcggatggagcgagcgttttgccattagcatccacgtaattcactgttacaggctctgctgctacgatatttttagtatacacatatgtcactgtttggctacttgtgttgaatgttccggttgcgttatctggtgtagttgttagcgtatagccgtcgatattttttggctcagttgtgtaattatctcctactgttccagaaattttagtggcggagctcagttgtttattattttcgtcaacatagtgaatttctacaactcctttttcaggggctggattttttgtgtaaatatagttgacggtttgcgcgctacttgtgaattgtccagttgcattggttggttcggcggataatgtatagccgtcgatttgtttggcagtggcgttatatgtgtcgcctacatttccgtttaatgtttcggatggagcgagtgtttttccagtatcatccacgtaattcactgttacaggctctgcggctacgatgtttttagtgtacacgtacgttacggactggctagtagtagtgaatgttccagtggcgttatctggagtagtcgttaatgtataatctgggatgtctttcgcgctagaagtataaggatcgtccaaattaccgcttaaaacttcatcagccgccaatttttctcctttgtcatcaagataatgaactgttacgtcttctcctttgatgggttgaggggcttcaaatggagttgttacggttcctactatagctccgtttt

SEQ ID NO: 3761 - DNA, 5113 bp, Listeria monocytogenes 4b
  misc_feature (1)..(end): n can be any nucleotide: a,g,c or t/u
attccttatgttcaaaaaagtaatcggtttcattagaatgtaattgtaagcaaggcattgaaaaaatacggggtgacgaaatgatagtatcggaagaacaattatttttaaatcagcatctacgcacaaaagaagaagtgctagcttttattgcagacaaggcagaagaaatcggtatcacaacaaattcagctcaggtggaaagtgacttatgggctcgcgaaaaagaatacgcaacagcagtacaacaattaatcgctattccacatgcgaaaacagaggcaatatcagaagcaaaactgcttttcattcgcctcactgaaccgattgattgggagtcaaaagaaggttttaaggcacaagccatttttgccatattagttccagctagtgaggccagccagcaacatctgaaaattttatctagcgtggctgtgaatttactagaagaagcatttcaagaacaaattttaacgattaaaacggaacacgaattgatggattacttgaaagataatttggaaggagaattaatatgaaagttgtaggagttacatcatgtatcgcaggacttgcgcacacaccaatggcagccaaagcactagaaaaagcaggagtaaaattaggacacgatgtcaaaattgagcaacaaggagcgatggggacaattgatgaaatcacgccagctgaagtgagcgcggcagatgtagttatcatcgcggcggataaagtaatcgacggggaagagcgtttcaaaggaaaaccagtcgttcgtgtgaaaattggtcaatgtgttgcgaacggggaagcggtgttaagtaaagtagttgcagcaattgaagcacgtaaacaaaaggaggctaactaagtcatgaaagggaaattaaacgaagcaaaagaccacttaatgtcgggtatatcctatgcgctaccagtcattatcgcaggttcacttgttgtagctgttgcaaaattgattgggattattggcggggttacaaatctggatgcttatgctgatgcaagcggattttatcattatgtttatctatttcaaaatgtaggttgggcggcaattggcttacttaacttagtacttgcgggatatatcgcttattcaatcgctggaaaacctgctcttgctgctggttttgttggtggggtccttgctactagtacaaatgctggtttcttaggtgccgttgtcgctggtttcttcgcaggttggttaacaaactgggtgaaaaaacatgttcgaatcactggacctgctgcaagttctttaccactaattattttgccacttatcacagttggtgccacggggatactgatgtcactaattctcggcggaccgcttggttggttaaaccaaacgttacttgattgggtaactgaaatgtgtaaaaacgatacaaacgtcattattctagcacttattttaggagcaatgattggatttgaccttggtggacctgtaaacaaagctgcttggatggctgggaacgcgctatttatgagtggaatttatctaccttcaatcatgatcaacgtcgcaatttgcattccgccacttggctacggaatcgcaacacttttacgcaaaaagaattattctactacattcaaagaagctggaaatggcgcgctaatcatgggactaattggggtcacggaaggtgcgattccttttacactgcgtagccctggtaaattaattccgttaaatgtgattgcctgtgcgattggtagtgcagtaacaatggggcttggcgcttatgtgaaaatgccgccgattggtggaatgtacggtttcttcactattggtaacggctgggcttacttagttggtggcttggttggtgcatttattattggaatttgtgcgaacttattcgtcaatttcacagaagaagaaacagctgctgcagacgatgctgtggatgatatcgatattagttttgatgaaatagagattaaataatagttggaggatttaatgaaaatggctaaaacgaaagtacacgtaattccgcattcgcactgggatagagaatggtatttcacttcaagccgttcaacaatctatttagtgaagcatttaaaagaagtaattgaaacattggaagcgaaagacgattaccatttttacttaatggatgcccaaagctctttaatagaagattatttgcgctactgcccggaagataaaacaagattagaaaaactgattgctgaaaaacggcttattaccgggccatggtatacacaaacggaccaattagtcatttcacaagagtcgattgttagaaacttgttatatggtacgagaattgcacgcgaaatgggacatagcatggctgtcggttatgtcccggatgcattcggacaaggcgggaacatgccacaaatttataaagaatttgggatttcaaagtttctgttttggcgcggagttgccgataatcgcttaaaacaaaccgaatttatctggcgcggtgatgatgggacggaaatgctagcagagcaaattccgtttggctattactacggcgcgaacattccggaaaacgaagccgaacttaaaacctatttggatgatcaaattggtgctctggaagagaaggcctcaacgcgaaatgtctatttcccaaatggcttagaccaagcgccagttaggaaaaatttgccagaattagttgcgaaattcaatgaattagatagcacgcgggaataccaaatcgcatcaccagaaacatttttcgcggacttagaaaaagatgtgaccaatttgccagtcattgctggtgaactaacagaaggaaaacatagtcggctgcacaaatcgattttctctactcgagctgatttaaaacaagcaaacaatgaaatcgaaaactttttaagtaatgtattagagccggttctttccatcagctactctcttggaaatcgctatccgcacaatgaactcgcagaaatttggaagttaatgtttgaaaatgctgcacatgatagcattggcggctgtaatagtgatacaaccaaccgcgacgtcaaacatcgttacaaattggcttcggatttagcgaccaatttactcgatttaaacatgcgcctaatcagcgaaaaaatcgaacaaaaacaaccgttccaatttaccgttttcaacccactaccatacgaaaaaagcggtgtgattaaaatgaccgcgtatatcccagaagataatttcgagatagaagatacgcaaggaaacacgcttgaatacacgattttagaaaaaacagacctaactgattacgtcttaaatcaacatatcgacctaaatcctagcaaatccatttatttgccagaaaaagtctttttagcaacaatgctagtaaacgtaaatagtcttccggcgctaggctacgacaccatctactttaatttagaaaaagaaacagcggagcaagaaccaacacaatccaccatgacaaaaatcgaaaacgaattttatgaaatccagctagctgccaacaattcactcacgattcatgataaaaaagcgggcagaacctatacagatcaaatgctttttgtggaaaatggcgatgatggcgattcgtataactattcgccaccacgtaaagaccttgtaatctcatcggaagaagcggtagtggaaagcctagagtctagtatatcaagcgtcaaccaaacattaactatttccttcaagttaaatgtaccgtataatttagaagaacgtgcaaatggtgaaaaaaataacgaaatgactatcaaaacagtaatttctttacgtaaaaatgaagaactcattcgctttgatgtacaagttgctaatcaagtattgagtcatcgtttatgtgttacattcgccaccgaaattgctagcaaattctcaacagctgatcaattattcgcaccaatccagcgtccggttcgtcttccagaaatggatgtatgggaagcagaagaatggcaagaagcgccaatttcgattgaagctatgcaaagttttgtcagcttacacgatgaagctcatggggttgctgtaatgacagagggcgtacgcgaatatgaaatcattggcgaaaattatgatacgatctcgctaaccctgttccgcacatttagccatatgggtaaaactgatttactatatcgtcctggtcgcgcttccggtgagtcaatcgttgcgacaccagacgcacaactgcttggcgaaataaatgccacatttgcgctaactttattcgaaagctcttttgacgaagcggatatcgcgaaaaaagcaaaagaatatctatcgaacccgccagtttaccaaatgtctgatttcctaaatggccgtttgatttatgtttaccgcgatgaagaaaaaacgctagatgccacatatagcctggcacttccgacaatagatggagcgattattagtgcagtaaaaaaagccgaagacgccgatgccttcattacacgctttttcaatccatatttacaaaaagaaattaccatcccagaagttttccaaggcaaggaacgccacttggatgaaagcgaatcaaacgagaaacaaacgagattaaaacatgcaaaagtacaaagctatttatttgaaaaataacgcttaactacctaaaaaaggagctgctaataatgggatatttcgcttataaacgtttggaaacactatatggcatgctccttgatgcgggtagccacttatcagctcagaaactcagccaagatttacatatttccgaacgtacgatacgaacagatattgctaaactaactgaatttctcgaaagctacggggcaacgataacgctaactcgaggcgcgggatacaaaatcgaaatccttgattcgttggtttttcaagcttttcaggccgaaaaaaacaaaccaaaaaatgcgggttattttgaccttgataatcccgaagaacgcgtgaaatacgagattttcatgctgttatcaagcggcgactatattaaattggaagacttggcagatacgatttttgctagccgtgcaaccatttcaaatgatatgaagcaagtacgaaaagttattgcggtgtatgatttaacgctcgtct

SEQ ID NO: 3762 - DNA, 4271 bp, Listeria monocytogenes 4b
  misc_feature (1)..(end): n can be any nucleotide: a,g,c or t/u
aaacaacgaataacttctacacgtaaaacaagtcaaattacaaaagcaatgcaaatggtttcagcagcaaaactaggtcgtgcagaatcaaacgctcgttcatatgagccttacgtttctaaaattaaagacgtagtaacacatgttgctagcactggtaacagtattgatcatccaatgcttgtatctagacctgttcaccgtactggttatatcgtacttacttctgatactggacttgcaggttcttacaatagttctgtaatcaaagaagtatttcaagaaattaataaaaagcatacgtcaagtgatgaatatgcaataatcactgtaggtagatctgctcgagacttcttcaaagcgcgccaaatgaacgtggttttagaagtacaaggcattacagatcacccgatatttgcggaaattaaagatattgctagtaacacagttcaaatgtttgaagatggtgtttatgacgaggttttcatttattataatcaccatattaattctatttctagcgaactgagaaaagagcaactactaccactgacagaatttcacgaaaaaggtaaggaaacagatgtagatttaactacatacgaattcgagccttccgaacaagaaattctggaagtattattgccgcaatatgtggaaagcctaattttcggagcacttctggatgccaaagccgctgaacatgctgctcgtatgactgccatgagaagcgcgacagacaatgcatccgatttaatcagtgacttatcactacaatataaccgtgctcgccaagctgcgatcacgcaagaaattaccgaaatcgtcggaggagcagccgcactagaatagaagtcggcgtttcttgtaacgtcccaataaatgggaaggtaagtgaggaggaataattgcatgtctaaaggacaagtaatccaagttatgggtccagttgtagacgttaaatttgaaggtggaaacttacctgaaatctacaatgccctagttattgaatataaatctgatgcagaagaagcaccaactagccaacttactttagaagtagccatccaattaggtgatgacgttgttcgtacaatcgcaatggcatcaacagatggtgttcaaagaggtatggaagttattgatactgggagcccaattacagttcctgtaggtacagtaactcttggtcgtgtatttaatgtattaggaaacaccatcgatttggacgaaccacttccaagcgatattaaacgtaacaaaattcaccgcgaagctccaactttcgatcaattagcaacaacaacagaaattcttgaaacaggaattaaagtagttgacttgttagcgccatacctaaaaggtggtaaaatcggactgttcggtggtgcgggtgtaggtaaaaccgttctaattcaagagcttatccataatatcgcacaagaacacggtggtatttcagtgttcgcgggcgttggagaacgtactcgtgaagggaacgacctttactttgaaatgaaagattctggtgttattgaaaaaacagcgatggtattcggtcaaatgaacgagccaccaggtgcgcgtatgcgtgttgccttaactggtttaacaattgctgaatatttccgtgatgaagaacatcaagatgtacttttattcattgataatattttccgtttcacacaagctggttcagaggtttcggctttactaggtcgtatgccatctgcggtaggttaccaaccaaccctagctactgaaatgggtcaattacaagaacgtattacatctactaacgttggatccgttacttctatccaagcgatttatgtaccagccgatgactatactgacccggctccggctacaactttcgcccatctagatgcaacaactaacttggaacgtaaattaacggaacaaggtatttatccagcggtagatccacttgcttctacatctcgtgcgctttctcctgatatcgttggagaagaacactatgcagtagcaacggaagtacagcgtttattacaaagatataaagaattacaagatatcatcgcaatcttaggtatggatgagttatctgacgaagataaacaatccgtttcccgtgcgcgtcgtgtacaattcttcttatcacaaaatttccacgttgcagaacaatttacaggtcaaaaaggttcttatgttcctgttaaagaaacagttaaaggattcaaagacctattagccggaaaatacgaccatattcctgaagatgcattccgttcagttggacgcattgaggatgttcttgaaaaagcaaaagacatgggcgttgaagtctgataaaaacaggaggaaatacgtatgggttcattaaatgttagtattgttactccagacggccctgtttatgaaggcgttgctcaaatggttattgctagaacaaaagcaggtgaactcggtattttacctggccatgttccactagttgctccacttaaaatcgacatcgttcgtttaaaagttgagtctggtgaggaatgggtcgctgtcaatggtggctttatggaagtaaacggtgaagaagttaatattctcgcggatactgctgaacgtgaacaagatattgatattgatcgcgctgaaaaagcaaaacaacgtgcagaagaagaacttagccgagcaaaagaacaaaaagtggacgaagtaatggctcagctggcactacaaagagccatcaacagaattcatgcaaaagaacacaattaataatcatattacttcctggccacagtgccgggaagtttttttatatgcataagtgtattaactgtttttttctagaggtatttgttaaaatgagtagtagcgaaatatgaggagagaacgcatgtataatattattatggaatcaccatatgtcatcatcatttcacatttactatttattgtaattactttttgggcactccaagctattaattatgaaaaattcatcaagaagaatcatgtaacacaagctagattattatttgtgattatttcgattgtattaggttatacattaagcaattttttcttggattatttggcagcttccaaacagttaattaacttttttagttagaaaaaggtactatagtagtcaaaaattaatagaagcttataacaactttaatattacgttaaaatcagttgatattttagggtgataagtggtagaattacttagatatgttttaaattcaaattttgattaataaaattcgataaatgatttagttattagtaacgcggaggggttctttttggaaaaaattattgtacgcggtggaaaacagttaaatggttctgtgaaaatggaaggtgccaagaatgctgtattaccggtaatagctgctacattacttgcgagtaaaggtactagcgtattaaaaaatgtcccaaacttgtctgatgtattcacaatcaatgaggttcttaaatatctaaatgcagatgtttcttttgtaaatgatgaagtaacagtcaatgcaacaggagaaatcacttctgatgcaccttttgagtacgttcgtaaaatgcgtgcttccattgttgtaatgggaccacttttggcacgtactggttcagcacgtgtagctttacctggtggatgtgcaattggctcaagaccagttgacttacatttaaaaggttttgaagcaatgggcgcaatcgtgaaaattgaaaatggctatattgaagcaactgctgaaaaattagttggtgctaaagtatacttagatttcccaagtgttggagcgacacaaaatattatgatggctgctactctagcagaaggtactacagtaatagaaaacgtggctcgtgaacctgaaattgtcgacttagcaaacttccttaaccaaatgggtgctagagttatcggtgcaggaacagaagtaattagaattgaaggagttaaagaattaactgcaactgaacattctattattccagaccgtattgaagcaggaacatttatgattgctgctgcgattactggtggaaatgttttaattgaagatgcagttcccgagcatattagttcgttaattgctaaacttgaagaaatgggcgttcaaatcattgaagaagagaatgggattcgtgtaattggtcctgataaattaaaagctgtggatgttaaaacgatgccacacccaggttttccaacagatatgcaatcgcaaatgatggttattcaaatgctgagtgaaggaacaagcatcatgact

SEQ ID NO: 3763 - DNA, 4736 bp, Listeria monocytogenes 4b
  misc_feature (1)..(end): n can be any nucleotide: a,g,c or t/u
aatccgttgtttgtttttgatacttttgtcattggttcagggaacagatttgcccacgcagcatcacttgcagtagccgaagcaccagcgaaagcatataatccactcttcatttatggaggagttggcctcggtaaaacacatttaatgcacgcagttggccactatgttcaacaacataaagataatgcgaaagtaatgtacctttccagcgaaaaattcaccaatgagtttattagctctattcgtgataataaaaccgaagaattccgtacaaaataccggaatgtggatgtcttacttattgatgatattcaatttttagcaggtaaagaaggaacacaagaggaatttttccatacatttaacacactttatgatgaacaaaagcaaattattatttccagtgaccgaccaccgaaagaaattccaacattggaagatcgactgagatcccgctttgaatggggcctaattactgatattacgccaccagacttagaaacacggatcgccattttacgtaaaaaagcaaaagcagacggattagatattccaaatgaagtcatgctttacatcgcaaaccaaattgattcgaatattcgcgagctagaaggcgcactcatccgagtagttgcttattcttccctcgttaataaagatataacagctggtcttgcagcagaagcactaaaagatattatcccctcttctaaatcacaagttattacaattagtggtattcaagaagcagtcggtgaatatttccatgttcgtttagaagattttaaagcaaaaaaacggacgaaaagtatcgcattcccgcgccaaatcgctatgtatctttcaagagagcttacagatgcctcattaccaaaaatcggtgatgaatttggtggtcgagatcatacaactgtcatccatgcacatgaaaaaatatcgcaactactaaaaaccgatcaagtgttgaaaaatgaccttgccgaaattgaaaaaaatttaagaaaagcacaaaatatgttttaatagacctgtgtacaatgtggataactgaaacatacttacccacaagttatcaacatgtggaaaactttatgtcgcatggcttataacctacttatccacaaatccacagcgcctattactattactacgattttttattaattaattaaaggtttttgaggttttacaaaatataaaaaaatgggggatactcatgaaatttgttattgagcgtgatcgtcttgtccaagcagtcaatgaagttactcgtgccatctctgcaagaacaacgattccaattttaacggggataaaaatagtcgtaaatgatgaaggtgtaacactaactggtagtgattccgatatttcaatcgaagcatttattccattaattgaaaatgatgaagtaattgtagaagtggagagttttggtggaattgtacttcaatcaaaatactttggcgatattgttcgtcgtttaccagaagaaaatgtagaaattgaagtgacttctaactaccaaaccaacattagttctggccaagcatcctttacattaaatggcttagatccaatggaatatcctaaattacctgaagtaacagacggaaaaacaattaaaattccaattaatgtacttaaaaatattgttagacaaactgtttttgctgtgtctgcgattgaagttcgtccagtacttactggtgtaaactggattatcaaagaaaataaactaagcgcagttgcaaccgatagtcatcgtctagctttacgtgaaatacctcttgaaacagacattgatgaagaatacaacattgttattcctggaaaaagtttatctgaattaaataaacttttagatgatgcaagcgaatctattgaaatgacccttgccaacaaccaaattctttttaaattaaaagatttattattttattctcgtttacttgaaggtagttatccagatacatctcgattaattccaactgatactaaatcagaattagtcattaattccaaagcatttttacaagcaattgaccgtgcgtccctacttgctcgcgaaaatcgtaataacgttattaaattaatgacgctagaaaatggccaagtagaagtatcatccaattctccagaagttgggaatgtttctgaaaatgtcttcagccaaagttttactggcgaagagatcaaaatatcttttaacggtaaatacatgatggatgccctacgtgcttttgaaggtgatgatattcaaatttccttctccggtacaatgagaccattcgtacttcgaccaaaagatgcagccaatccaaatgaaattttacaattaatcacgccggttagaacttactaatctcgcaaaaagcacatccgtcttggtttcaaggcggattctttttttgttatagtacagtttttggatagaaatgtatatttatgcaaacggaggtaattcttagcatgatgaaagatatgacaacaggtaatccgacaaaattaatttttttattcgcgatgccgatgttgattggaaacttgtttcagcaattttatacgatgattgatgctgttattgttgggaaatttgtcagtgtagatgcgctggctgctgttggagcgacaaattcggtcaatttttttatgatttctttgattattggacttatgagcgggatttctgtcgtagtagcgcagtattttgggtttaaagattttgatcgtttgaaagatgttattgcaacggcgacttatgcggtggttttttcggcgattattttaactgttgcaggagttttgctagcaaagccattgctaattttacttagaactccagcgaatattttggatgattctactatctttttaaccactctttttattgggattttaccgatgagtctgtataacggaatggccgcgatacttcgggcgcttggaaattcgattacaccgctgatttttttaattttatcgtccttaatgaatattgcacttgattttttatttgtcgtatatatggatatgggcgttcgcggggctgctattgcgacagttctttctcaaacagctgcagcaattgccgttatttactatgcttatcgccacgtaccatttatgcggatagagcgcgcaaaattcaagctttccaccccactacttaaagaaatggtgcgcattggactaccttctggattacaaggatcctttatttctatcggaaacatggctcttcaaagtttaataaatggatttggttcatcggtcgttgcggcatatacggcggcgagtcgaattgattcacttacatatcaaccaggaattgcttttggagcagcttcttcgatgtttgctggtcagaacatcggtgctgggaaaattgaccgcgttcgcgaaggtttttggtcgggaattaaagtagttacagctatcagcattggaataacgattttagttcaacttttcgctcgggagtttttattactatttgttgattctagtgagacggaagttattaatatcggtgtaagttatttacttattgtctctttattttatgtcgtagtaggagttttatttgttgttcgagaaacactcagaggcaccggagatgcgatggttcctttagctatggggatttttgagttagtttcgagactggttatcggatttgttttatcgctttatattggttacatagggctttggtgggctacaccagttgcgtggattacagctacgatgctcggcgtttggagatataaatcaggagcatggcaaaaaaaggcagttattaggcgaaaataaccattttagtaaaaaaacgccagagaagctcatattttcttttttttaataaataatatccccccattagttttgctaaaaaaagctgaaaaacgaatatatgaaaatattctttgtattattggcaaaactttagtaaaatagaaggtagtgataaaaaaagattgggcgtgaaatttttggctgaaacagtaaagataaatagcgagttcgtaacgcttggtcaacttttacaaatgattgatgtagtttcaactggtggaatggcgaaagcgtaccttagtgaaaatacgatttacatcaacggagagcaagacaaccgccgggggaaaaagcttcgtaatggcgatgttatcttagttcccggtgttggaaaagtgaaaatcgagcaaggaaaataacagatgcatttagaaagtattgttttaagaaatttccggaattacgaaaacttagaactagaattttccccatctgttaatgtttttcttggtgagaatgcacaaggtaaaaccaaccttttagaagccgtattgatgcttgcacttgcaaagtcacatcggacaacgaatgataaagattttattatgtgggaaaaagaagaagccaagatggaagggcgaatagcaaagcacggacaatcagtgcctttagagcttgctatcacccaaaaaggtaagcgagctaaagtaaatcatttggaacaaaagaaacttagccaatatgtcggtaacttgaatgtggttatttttgccccagaagatttatcgcttgtgaagggcgctccaggaattagacgtcggtttttgaatatggaaattggacaaatgcagccgatttatttgcataatctaagtgaataccaacgtaatattgcaacaacggaaccaatatttgaagatgttgcaaatgaaacgaaa

SEQ ID NO: 3764 - DNA, 5769 bp, Listeria monocytogenes 4b
  misc_feature (1)..(end): n can be any nucleotide: a,g,c or t/u
ggtattctatcttagaattaaaatttatctcttatccagagcggtagagggactgaccctttgaagcccagcaacctacacatataagtgaaaggtgctaatctgttgcaggagtattatcttctgaacgatgagagcaaaggtataattatagcctttctctattcgtgcgcgttttgtgcaaaatagagagaggctttttatatgagacgtatttggagagaattgaaggaggaaaataaattggctaagaaccgtcatctatttacatcagaatcggtttctgatggacatccagataaaattgcagatcaaatatctgatgcaattttagatgcaattatttcaaaagatccggacgcacgtgtcgcttgtgagactactgtgacaacgggtttagtattagtatttggtgagattaccacctctgtttatgtggatattcctaaaatcgtgcgtgatacaattaaagaaatcggctatacacgtgcaaaatatggtttcgatgcagaaacgtgtgccgttttaacagcgattgatgaacaatccccagatattgcgcaaggagtcgacgaagcactagaatcaagaagtggtaaggaaatcgatgcggctattgaagcaatcggagcgggagaccaaggattaatgttcggttttgcaacagatgaaacagaagaattaatgccactgccaatctttttagcacatggcttagcacgtaagttaacagaattacgtaaaacaaataaattagactacttgcgtcccgatgcgaaaacacaagtaacggtggaatacgatgaatttaatcaaccagttcggattgatacaattgttgtttcgacgcaacatcatccggacattacgcaagagcaaatcgcaaaagacttgcacacgtaccttttcccagaagtgattgatgcctctttcttagatgaagatacgaaatactttattaatccaactggtcgctttgctattgcgggtcctcttggcgatgcgggcttaactgggcgtaaaattatcgtggatacatcgggtggttatgcgcgtcacggcgggggagcgttctccggtaaagatccgaccaaagttgaccgatcgggcgcttatgctgcaaggtatgtagctaaaaatatcgttgctgcaggacttgctaaaaaagtagaagtacaagtcgcgtatgctatcggagttgctcgtccagtttccatttcgattgacacatatggaacaagtgactattcagaacaagaattaattgatggcgttaatgagctatttgatttacgcccagctgggataattcatatgcttgatttgcgtcgcccaatttatcgtcaaacagctgcatttggtcattttggccgtagcgatcttgatttaccttgggaaagaaccgataaagcagaagccttaaaaaaattaatcgtaaaataagcttaaccgaacatttcttgtaaggaatgttcggtttttttctttcctaaacagtgcaaagaaagtctagttatgatatgatagacgttgtgaaaaaaagataaaatgattatctatatagaggagaaatgttaccatgtgtggatttgtaggatgcgtacatgaccgcattacagaaattactggcgctgataaagaaacctttagacaaatgaacagtatgattacgcaccgtgggccagatgatgaaggatacttacagatgacacgtgcagtttgtttccgcgtttagtatattgatgagaaacgcatacgtacgtaatgactcgtattatgatgcgtccnnnncnnntnanantgaacgnnactggattatttttaatggagaagtttataactatgtggaactccgtgagcaattagttgctgaaggaatgacatttgaaaccgaaagtgataccgaagtaattatcgctacatatgcgaaatacaaagaaaaaacagcagaacgtcttcgtgggatgtttggtttcgttatttgggataaacaagaagaacttgtttacggcgcacgcgacccatttggcattaaaccatttttctatgcagaagaagatggcaaattgttcatgggttctgaaaagaaatccattctacatgctttaaaagaaaaagaattggatgaagtttcattacaaaactatatgacttaccaattcgttccagaaccagattccttaactaaaaatgtaaaacgtttagaaccaggacatcagttcacgaagaaaattggtcaaccaatggaaattactacttattggaaagcatcttttgcaccagtaactaaatcagaagacgcatggattaaagaagtgcgtgacgtgatgtatgattctgtaaaaatgcatatgcgctctgatgtaccagttggttcattcctatctggtggtattgattcatcgattattgctgcgattgctaaagaatatcatcctgcaatcaaaacattctctgttggttttgaacgcgatggtttcagtgaaatcgatgtcgcaaaagaaacagcagacaaacttggcgtagaaaacattagttatgttatctcacctgaagaatatatgaaagaattaccaaaaattgtttggcatatggatgatccacttgctgatccagctgctattccgctttacttcttatcaagagaagcgcgcaaacaagtaacggttgcattgtccggtgaaggtgcagatgaacttttcggtggttataacatttataacgaaccgaattcccttgcgatgtttaacaaaatgccaagcgtatttaaatcaatgctaaatagcgtggcgcgcattatgccagaaggtatgcgtggtaaaagtttcttagaacgtggaaccactccgatggaagaacgctatatcggaaacgccaaaatgttcacggaaaaagaaaaacaaattttacttccaaaatatcaagctggtcatgactatacgaacattacagatccattttatgcagaaacaacgaattatcatcctgtagaaagaatgcagtacattgatattcatacgtggcttcgcggagatattcttctcaaagctgaccgcatgacgatggctaattcgctggaagtccgtgtacctttccttgataaagaagtgtacaatgtggcaagaaatattccagatacaatgaaaacaaccaatggaacaaccaaatatatcttacgtaaagcggcagcaacatttgtaccagaacacgtacttaaccgccgtaaactaggattcccagtaccaattcgtcactggttaaaagacgaaatgaacgcttgggttaaaaacatcattaaagaatcaccaacagatcatttaattaacaaacaatacgttctaggattactagacgatcactgtgccggtaaattcgactacagtcgtaaaatctggacagttgttattttcatgatttggtatgatgtatacgtagcagataaatacgattttggaaaataaaagaaaacctagacaaagctattaattagcctgtctaggttttcttttttcgatgataatgacgaatggggcatcatttttttgattaataaattgataagataaaacgtggaaatcttgttgtgggattgcttcacaaaaagtcacaacagcatctttttcgatttttccagcagggtggccgtgatatataacgagaataatgacgccaccaacttcgagcagctgcattaaatgaccaatgctttctagcgtcgaatcagcggttgttgtaatttctttgtcgccacctggtaaatatccaagattaaaaatagcggcgcgaacaggtctggatgtgtacgcagggatacgtgcatggctagcgcaaacgagttccacttgcgaagaaacacccgcattttctaaacgagccttcgtcgcatcaacagccatttgttgaatatcaaatccaagtacatgcccattaataccaacaagttccgctaataaaagcgtatcgtgtccattaccacaagtggtgtcaatcacataatcaccaggacgaactacttttcgtagcgtatcatgagcgaaggggagaatgcctcttaaattcattcagaaatcacttccacaggttgatagtgtttcccttgccagctatctcttcgaacaagttctgcatcaatcgcattcaacacttcaaacttatttaaactccaaacagggccaattaaatcatctacgccaccatcaccagtaatccggtgaataaccatctcaggcggtaagatctctagttgatcagcgactaagtttacatagccatcccgagttaaaaattctaagtcaccttttttataatcttctaccattggcgttccttttaataaatggagcaaatggattttgataccatccacgccactttcgactactttccgcgttgtttccatcatcatttctggtgtttcttttggaagaccgttaataatgtgggtacaaatccggatattgtgcttttgcagtttgtgcactccttctagataacaatcataatcatgcgcccggttgattaagcggccagtctcatcatgagcagactgcaatccaagctccaaccataaataagtacgttcattcaactcagctaaatattccaccacatcatctggcaaacagtccggtcttgtcgcaatcgaaagcccaactacacccggctcattcaaaacagtttcaaatttctcacgtaactcggcaaccggtgcatgtgtattcgtgaaagcttggaaataagcgatacatttcccgtctttccatttcgtttgcatcttgtcgcgcacttgctggaattgtacttttaaatcaagcgctcggttgccagcaaagtccccagaaccagccgcgctacaaaatgtacaaccaccatgcgctaccgtaccgtcacgattcggacaatcaaagccgccatcaagcgccactttgtatgtcttttgcccaaattcttctcttaagcagtagttccatgtatggtatcttttattatcattgctatatacaaatggattcgtttgtttcactagttttagactccttcaaatgaaattctccattcattttagcacattttgttaggaaagttagataaatcttcagagcgcttgctaaaaaaatgaaattcagctacaataagactaatgaattttgcgaaaaagcgatgaattggagtagtaatctgcatattttgatgtgaagagagctgacggttggtgcaagtcagtcacaaaatccggatgaacttaccatggagcttgggtgtatccccgttttccgcgttaaggaattgataagttgagtggtcaaacactaatgtgggtggtaccgcgggagaagcatctctcgtcccatggcgataagccgttgggatgtagggatttttttgtagccaaaattcgatattttaaggaaaagaggatgagtaaagtgacatttaatcacaaaaaaatggaaccaaaatggcaacaatattggagtgaacataacactttcaaaacaacagaagataaaaataaagataacttctatgcactagatatgttccaaatacccatctggagcaggtcttcacgtaggacatccagaaggttatacagcaacagatattttgtctcgtatgaaacgaatgcaagggaagaacgtccttcatccaatcggttgggatgcttttggtcttcctgcagagcaatatgcaattgatactggtaacgacccagaagaatttactttccagcacaagtcggccgtcgagcaggagtaagtgccacag

SEQ ID NO: 3765 - DNA, 1402 bp, Listeria monocytogenes 4b
  misc_feature (1)..(end): n can be any nucleotide: a,g,c or t/u
ttgtaggcacacggtttcaggaactgtttcactccccttccggggtgcttttcacctttccctcacggtactggttcactatcggtcactagggagtatttagccttgggagatggtcctcccggattccgacggaatttcacgtgttccgccgtactcaggatccactctggagggaaagccatttcaactaccgggctgttaccgtctttggcgggcctttccagaccgcttcatttataactttcttttgtaactccgtatagagtgtcctacaaccccaagaagcaagcttcttggtttgggctctttccgtttcgctcgccgctactcaggaaatcgatttttctttctcttcctccaggtacttagatgtttcagttccctgggtctgccttcctcacgctatgtattcacgtaaggatactatccgactaaagatagtgggttcccccattcggaaatctctggatcaacgcttacgtacagctccccaaagcatatcggtgttagtcccgtccttcttcggctcctagtgccaaggcatccaccgtgcgccctttctaacttaaccaatttacttctacgaagtaaaggttgtttttctgattttccgtatcagcgatgatacttcccatcagatgaaagattcactttcagatgattctcggttacttgtgtcataaataataaattatctatgctaactttactaactttcttatctagttttcaaagaacaaacatactgagaagtactaacctctcaaaactgaacaaatagagaagaacgaaaactcacaggtttccttttccttagaaaggaggtgatccagccgcaccttccgatacggctaccttgttacgacttcaccccaattatctgtcccaccttcggcggctggctccataaaggttaccctaccgacttcgggtgttacaaactctcgtggtgtgacgggcggtgtgtacaaggcccgggaacgtattcaccgtggcatgctgatccacgattactagcgattccggcttcatgtaggcgagttgcagcctacaatccgaactgagaatagttttatgggattagctccacctcgcggcttcgcgaccctttgtactatccattgtagcacgtgtgtagcccaggtcataaggggcatgatgatttgacgtcatccccaccttcctccggcttgcaccggcagtcactttagagtgcccaactaaatgctggcaactaaaatcaagggttgcgctcgttgcgggacttaacccaacatctcacgacacgagctgacgacaaccatgcaccacctgtcactttgtccccgaagggaaagctctgctcagagtgtcaaaggatgtcaagacctgcataggttcttcgcgttgcttcgattaa

SEQ ID NO: 3766 - DNA, 5082 bp, Listeria monocytogenes 4b
  misc_feature (1)..(end): n can be any nucleotide: a,g,c or t/u
agggtcgaggggggggggggggtccgcggggtggggggaggggcggctgcgaacccgtggggcgtggtggggggtgggagggggcgggggcgaggcggggggggcgggggggggcgggggggcggggggggggggggggggggtgggagatggagagggccgcccctggggcatggcgatgatggagcggggttacatcttgttgatcggattggtatgctgtgattgtttcgatagctgtagcagtgtatagatttgcttgtgccataaaataatcattcaatccagcaatttggtttgatcccaaaaaacttataacatttttattcttctctaatgaaactatccctttttcaataaaataaacctttgtatttattgtatcctctgttagtaaaatcatgttgctcggtatccttgtttttttataagggattctgttatcgattaaagtttgcaagaagcatgtataaccaaattcttcttccaaaatttttttactatacaaatcttcaaatacggattgcatttattgtcatctcatttctattttatgttgttagcaaatagttttataatgcgatgagtggcttcttacaagtgatgatactaccaaacacttttaaaaggaacccaacaaaaaaacaaaacttcctgctttaaccaactatttttgacttttttgtcacaattgaattttattcactttataaattattgtataagtttcttttgatacttctattataagacgaagcacattccctctacttttctatccaaaaatttcaagcaacattttagtgaaaatagtatctttctaactacctttttagaagaataacctctattttttaatgattatcgcgatattttgtattatttgtgaaagttattaattcgtgtttttattcttccccgcttatgtttacgcaaaaatattctactagaagaataagttttatgcgcttatattgcgggaaactaatgacataggggggaatggtatgtatttaaaagaaacgttagatcaatttgcttcgatagataatattcttaaactgctcaagaaaaatccgagttttaataagcactgcattcaagagcggctcccacaaaaaacaattatcacatccaataaacaacgaaaacatatctatataatagaagaaggttttatgaaactaatatttgatgacaacaaaccgcgtgatttttcttatattttgtctaaaggagcatttccctttttgccagtttatacagaggatatacctgaacacacaatgatggttgctcttacagatattgtatggtggaaaattgatatcagtttctttaaggggatgatggagacggaagatccgcgaaattatctcatgcttcatcaattagcggaaactagaagaagattttacactatcgcttatcaagaaaaattgacttcacgtgaaagtatttattattctttaagtacaatgattgaatttggcctacgtatctccgaaaaaatagtagaacttccagaatttttaacttatcaaatacttgctgatcatgctaatacttctaaaagctacacgtctaaagttctaggacatttacgtgaagaaggcattttggaatcacaaagaaagccttggcgaattaacgatgtccagaagctccaaaagttaatagagatgaatgtaccacttgtaaagatacaaaaaaactaagagccaacttgcgctcttagttttttttgttagattagttcacttcgccaagctgtggtttttgcttgttggtatttttcaacttgaccaatagactcaaaaagttccatcttatatttcaccacttctttcgccgcatcaatacagtctgggtagattgcgttggcatcccaaagttctgttgtacttagaatctcacgacatttcttataaaaggcgtatttgtaatcgctggaaatatttactttttgaattccaatttcgacagctgcagcaatttcggcatctggatttgcagaaccaccgtgaagtacaagtggaatattcactaaatcttttatttcttttaagatatctagacgtaattttggctccttatctttaggataaattccgtgcgctgtcccgattgcaacagctagcgtatctacacccgtgcgactaatatattcttccgcttcttcgggttttgtatagataatctcactgacgccgccttcaatactgttaccggttttcccgatagtcccgagctcaccttcaactgagacccccagtttatgacaaacatcaacaacttcctttgtaacacgaatattttcttcaaaaggaagcaaagagccatcaatcatcactgaactaaaaccacaacgtaccgctcgcatcacatctcccatattgtcaccatgatccaaatgaagaacaaatggaacaggactatttttaattcttgcaagaacatattggaaaaagtcatctttcgtaaaatctaattctgttggatgcactgcaataattgctggagcattgtttttttcagcttcttctactaccacccgtaaaaagttactgtctgcaacattaaatgctcccaccgcgaatttgttttccttagctacttctaataattgtttcatatttactaacatattttcatttctccttttaaagtgattttccggttgaaccggatagttgaatataatttttaacagcttttgtgccggcttttatcgtttcatgaattaagtccacatagttaacggccggattttcttttaaattcgtttttatttgatttacttgtgctttcatgaagtcggagccaacattgattttattgatgcccagtcgaacggattctcgaatattttccgccccgcaaccagaacctccgtgcaaaacgagcggcatgtttgtcgcggatttgatttctctgacaatatcaaactggaaagccggtgtaaaaccttctggataatcaccatgggaagaaccataagaaattgctaaagcgtcaatccctgttcgtttagcaaaatcgatggccactttggggtcggtatacatttcttgattggtgtaattatctccagtcaccgcaccaatattaccaacttccgcctcgacactagcatgataaacttctgcaaactcgaccatttttttcgtaattgcaacattttcttcataaggaaaactagacgcatccatcatcacactagaaaaaccatccgctaagcattgcttcactatcgccacatcatgcccgtgatccaaattaattgccacttcaacactcgcttcttctgccatttttataatgggttttgtcaaaaagcgacttcctagatgacttgtcaaatgatcttgaagtaaatcaatgataatcggcgcacgaagttcttgtgcagcatcaatgactgcacgagccgtttccagattaaaacaattaattgccattactgcataatgctccttgttcgcacgttctaacatacctttcatggacacatacatttcaaaatctcctcaccttatgaaattttaattccagacagatcaacttcatcttcctcttctaatccttggtcagcaatgagttcttcttctttagtaggttctcgtttcaagatgagtaacatggctgctgtgacacaagtaccaattaataatgctaaacagaataagagtggttcattcattgctgggacgataaacattccgcctgatggaactggtgagccaattccccaagtcatactaagacctccgccgactgccgcaccaagtgtacaagaaataataacgcgaatggggtcaaccgctgcaatgggaataacaccttctgtaatcatacaaatccccatcgggaaagcaattttgatattgtcttcttctgacttcgtgtattttttctttttaattaatttggaaactacccatgaaagggtcaccccgaatggcggaaccatcgaagcaagaatttttactgcttctggttctttgacgccttcaagaaggagcccatctgcgaataaggaggccactttatttacaggtccaccaaagtcaaatgctgccatagctccaagtacagctccgaaaacaaagcgcatactgccttgcatgccttgtaagaagcttgtcatcgcctccgtggcccaaacgattggaacccctacaacaaagtacatcagaagcccgacgactaaactactaataagcggaataatcatcattggcattaaaccttgcgcccattttggcacttttaaatatttcacaagaataagtacaaaataaccgactaagtatcctccaagcattccgcctaaaaatccagcaccgattgaattggcgataagtcccataagtaaccctggcgcaattcccggcctatctgctatcgaataggcaatcgcaccagcaataactggagcaagcagtcccataccaagcacaccgagagagacaagtgcatctggaatcgaataaggtgctttgtagttttcaataacttgtccatttgttaaatttccaatggcaataagtaaccccgaggcaacaactaacggtaacatatacgaaatcgctgtaagtgcatgttttttgatttgcagttttttcatcataccggttcactccctagttatttatttctttgtctattttattaataatttgttttggtgctttaatcgctaggtctgttggaatttcgacaactcgttttcctttaaaacgatcctttccgctaattttaatatcggcagcaataataactacatcggcatttttcacttgttctgctgaaagctcgtcttcgataccaattgttccttgtgtttcaatatgaacgttgtgaccaagcgctgtccctgcttttgttagtttttctttagcaatatacgtatgtgcgattcccgatgtacaagctgctattccaataatattcattccaaactcctcctaatcctgatttttggctaacaacttaattaaatcttcttttgtttttacagtttgaaattggccaatcacctcatcgtccgcaagtaagattgctactttttgaagtaat

SEQ ID NO: 3767 - DNA, 3734 bp, Listeria monocytogenes 4b
  misc_feature (1)..(end): n can be any nucleotide: a,g,c or t/u
ttaaaaccaggcgatacaatcattgagccaactagtgggaatactggtatcggcctagcaatggtagcagcagcaaaaggctaccaagcgattttcgtaatgccagaaacaatgagcttagaacgtcgcaaattacttcaagcttacggtgcaaaattagttttaacaccaggtccagacggcatgaaaggcgcaattgctaaagcggaagagcttgcaaaagaaaataactattttgttccacaacaattccacaacccagcaaatccagctgtccatgaagaaacaactggaccagaaatcgttgaagctttcggtaaagatggcttagatgctttcatcgcgggagttggaacaggtggaacagtaactggtgtaggacacgtacttaaaaagaactacccagatgttaaaatctatgctcttgaaccagaagaatccccagtacttagcggtggttctccatcacctcataaaatccaaggtatcggtgcaggcttcgttccggatacattagatacaaaagtgtatgacggcattctaaaagtttcaagtgaagatgctctagaaacagcacgtgaagtagcgaaaaaagaaggtatcttagtaggtatttcttccggagcaactgttaaagcagctctagaccttgcaaaagaacttggtgctggcaaaaaagtactagcaatcgttgcaagtaacggcgaacgctacctaagcacacctctttataattttgaagattaataatcagagagcctagattttctaggttctttttttatgaaaagaaataaatgcatttcttactattttctaatcaaacgcacagcggaaacttttttttcttggttaatatatagtcataagctaacaacaagcaaaacattttcattctttcccctttttagaatgaaaatcccaaactccctttttgaccagtgtggtttactccctttttccacactggtttttttcatgccaaaaaatgaaaagaaaaaccgaaaaatctcatgaaactttaacaaaagtcacagcgtatccaccaaaaacttggttaatatatagtcataagctaacaacaagcaaaacattttcattctttccccttttagaatgaaaatcccaaactccctttttgaccagtgtggtttactccctttttccacactggttttttcatggaaaaaaatgaagaaaaaaaccgaaaaatctcatgaaactttaacaaaaatcacagcgcatccaccaaaaacttggttaatatatagtcataagctaacaacaagcaaaacattttcattcttctccccccttttagaatgaagatcccaaactccctttttgaccagtgtggtttactccctttttccacactggttttttaataccaaaaaatgaaaagaaaaaccgaaaaatctcatgaaactttaacaaaaatcacagcatatccaccaaaaacttggttaatatatagtcataagctaacaacaagcaaaacattttcattcttctccccccctttttagaatgaagatcccaaactccctttttgaccgatgcggtttactcccttttccgcatcggtttttttgtgcgctaaaatcactgaattctgctataataaatctcggaaagaggtgtttgggcttgaagaagtggaaaagggatcacttaggtatggtcatggggatactgaatgttacgccagactctttttcggatggcgggaaatatatgcaagtggaagaagctgtggctcgagcgttacaaatggcagaagatggagcagcaattattgacgttggtggaatatctactcggcctggtttttcagaggtaacgcctgaggaagaacttaatcgaattattcctgtcattaaagctgttaggacaaaacttccggatatatggatttctgttgatacttggcgtgccgaagtggctgaaaaagctattttagcaggagctaatatgataaatgatcaatggggtgccaaaaaagaaccgaaaattgctgaagtagctgcgaaatataacgtgccaatttgtttgatgcacaaccgagaaaacacgcaatacgataattttctggaagatgtgaagaaagacttattagaaagtgttgcaattgctaaagcggcatccgtgccagatgaacatattattcttgatccgggtttcggttttgttaagacgcctgcgcagaatttagaagtgttacgacgcattgatgagatagtggcgcttggttacgaggttttacttggtacgagtagaaagtcgacaattggtctcgtcttaggaactactccagaggatagaatggaaggaactggggcgacaaccgtttacggattttcgaaaggttgcacaattactcgtgtacacgatgtacttccaattgcgcgcatggtaagaatgacagacgcgattacgggcaaattagatattacaaaattataaagaggtgctttagttggataaaatttatttaaatgaattagtgttttacggataccatggagttttggcggaagaaacaaaactaggacaaacgtttagagtatcgcttattctcggcctttctactaaaaaagcaggaatatcggatagcgtagacgacacagtcagctatgcagaagtttatgaaacggtaaaagaaatagtggaaggaacgccattcaaattaatcgaggcgcttgccgaaaaaattgcaacggaagttttaactggttatcctctattagaagaagtgactgtaaaacttattaaaccaaatcctccgattccgggacattatgattctgttgcagtggaaattgaacgtaaaagaagtgatttgaatggctaaggtgtttctatcaattggtacaaaccttggcgaacgtttagaaaatttaaatgacgcactaagtggtttagctgcttcagataaaattaaaattaccaacgtatctagtgtatacgaaacagacgcagtaggttacgaagatcaagcggcatttttaaatatcgctgtagaaattgaaacggactttccgccagttgatttactagatttttgtcttgcgctcgaacttgaattggggcgagttcgattatttaagtggggtccgcgactcattgatatcgatgttttattatatgatgatgttaaaatcgatacagaaaagctgaaaatcccacatccttatatgaaagaacgcgcttttgtgctgattccattaatagagatttcaccagaaaaaagcaatcttgtagataatccagccattttggaagaacaaggtgttcggaaaataaaaaatcaagtcaactggtaaaattggcacttgcagaaaaaactgattatgataacatatcactagcgcaatttaagaggaaggggtttaccattaatgtttaaaataggtaacgtagaaattaaaaaccaagtagttgtggcgccaatggccggtatatccaattccgcattccgtttaacggtcaaagaattcggagcaggtctcgtttgctgtgaaatgattagcgacaaaggaatcgcataccgcaatgctaaaacgcttgatatgctatatattgatgaaaaagaaaaaccattgagcttacaaatttttggtggtgagaaagaaacgcttgtagaagctgcgaaattcgtagctgaaaatacaacggcagatattattgatattaatatgggctgtccggtaaacaaaattatcaaatgtgaa

SEQ ID NO: 3768 - DNA, 4421 bp, Listeria monocytogenes 4b
  misc_feature (1)..(end): n can be any nucleotide: a,g,c or t/u
catgatagttgcattaatgctatttgcactggcaatcgcagtcatcttgctttgggttaatccgtttatatgatgggtgagaatatggagaaaatgattcaaacaataattctatatagtgttttcgcagtaggattcttatatttactgcatttcaccttaagaaaactagaaaatatcttgactagctttttttacgaagtgagtcaagatcagtcgcttgaaaaggaaagtcttttgcgccgtttaaagcgacaaaaagtagcaacaacacaagaagaacaaaaaaatcgtcaattggctattgaatcggaacaaaaagaagagctttttttagaagaaatcgatcaattaatagctcaaaataaaagctatgaacaacaattgcaggcatgggaaaatgaaaagccaaagcaaatcgtggaggtgcctagatttgaaacaacaccacacgcaccgtacaaatcactaagtagttacattaatgaaatttttcaacaagtttttattgagtcggaagaagatgaagcgcgtctatttacagaagcaattcgggaatttgatgcattagttagaacagaaaaaatacgttgtgcgctcccatacaaagtgattttgcagttatttgaaatgtattcgccagagcagttacatttatttgctcagtcatttcagagatatagtgagcgttcgagtaaacttcctgtgaaacaaatttaccaaagtagttatttatcgccagagcaaaaattaaaagtgatgcaagaagaaggtactttagatgagttagatgctgaatttatccaatttcttttttacatgatgacgcattactcttaccgccaaacgcggaacctgtatcgtaactttttagaggtatacaatattcatttttatacaggtcttatttgcatccatgtagctagcaaagattcagctaatcactttgaaaaactttggcagccggcgcataggggctataaaatcgagtatcaagtacaaaaagagttaattggcggagtgattattcaatatggttctaaatcaattgatatgagctaccaggaattaattaaacgatcaacagaaaaaatggaagcggaagtgaaactttgaaaacaattcattttgatatgaacaaatacgaaacccatgtggacttggaatatttgaaagaacatggccgagtggaaaaaatttctgatggagttattttctgctcaggcctagaaaatgcagcgctacatcaggctgttttaattgatgaaaggcaccgaggtgtaattctggagctcaatgaggaatttgtcggaatcggtttgattgataagacgaatgacattttagaaggtatgcatgttggggtctccggcaaatttatcgaagtagacctatttgaagaaatggcagggcgtgttattgatactacaggaaaaatgctttatgaagaaagtgaagaaaagccgacagcaacctctccacttttctgtgtaactccagctattatgacgattgatagtgtaacacgcccgcttaatacggggcttgcggtgattgattctattacgccaattggtcgaggtcagcgtcaattaatccttggcaatcgccagtctgggaaaacacaaattgctgtggatacgataattaaccaacatgatcaaaatgtgcattgcatctatgttgctattggcttaaaagcagcttatatcgcagaagttattgaaactcttcgaaatcatggagcaatggaatattctacggttgttgcaactgcagccagtgattcccttaccgcgcaatatttaacaccgtatgcgggtatggcagtagcggaagccttgcgagatcaaggtaaagatgtactcatcattttagatgatttaaccagacatgcggatgcttatcgagcaattactttactctttaaccgcccgccaggaagagaagcttatccaggagatagtttttatattcactctagcctcttagaaagggccgttcaaatgaatgaagaacatggtggcggttctattacagcaataccgatgattgaaactctatcagatgatgtaacagcttatatccctactaatgttatctctattacagatgggcaattatttttaaaatcggatttattcaaccgtggtcaaaagccagccgtagatgttggtgtgtctgtttcaaggattggcggcgatgcacaacacccaattatccgcaaattaagtaaaaacttaacgttgattctttcgcagtttgaggaattaaaagaattactcgattttggtaatgcacttgatgatggcagtatgaaaatggtatcggatggccgattattaacagaattattcaagcaaaaaattctaagcccgttatcagtaacggaattaatcgttattttatatgctttccaaaatggctttctaacaaaaatcccgcctgccaatattcagactttcaaagaccttttgctagaaaaagcgcatatgcataaagattttgagtcgttttcagctcagatagaaacgattaatgaactgaatgaatcgcacatcgaaatgctagaagagatcattcgggaagctgggaggctttttagttgagtagcatagaccaagcccgaaaaaccattaaagcactaaattcaacctataaaatagtccatgtaacagaactagcgacactcggaaaactttccgccttaagagaaaaagcggaagcggctgttagttattacgaaactattttaaaaagtttgcgctgggtgagaaaaactatgtacaccagtaataaccaagtaaaagaagaaaaaaatgttactgctattgcgataacttctgagcgtggtctttgcggcgcctataatagtgaggtttttgttgaaatcgaccagttgattgaatcactcggcgagcaagtaacgataaattgggtagttgtaggtgaacaaggtcaccgttatttaacaaaactaggtcagaatatcacctcttatttacagttttctcttgaaaatattgatttagaaaccactacggctgttactgctgattttattgacctaattcattcggaacaaatggacgcactatatgtgattttcacgaaatatttgaatgcagttcaatcagaagctatgtgtgaaaaaatttatcctgaaattccagaagactcgaatacggaggaaattgaagtagattatgtactcgatttcgagacggatgatgagcaggtggagcagttattattagaaaactatttgtgtggcttgctttatagcatgtttcgttactcggttgccagtgaatattgcatgcgccgaatcgcgatgaaacaagccaaagacaatatccagaaacaattggaagaagctatttttaatgccagaaagcaagcattacaacaaaaaactggcgaattactcgatatcattagtggagcacagacgattaggaaggacgaagaataaatgaaaaaaaacacaggaaccattattagtattagtggttttgttttaaaaatcgaatttaatgagagcgaactgcctgaaattggctttgcgcttgagtatcatacacatcaaggaacttatctagctgaagttgttcaacatactggaattaatacagtgtctgccatcgctattggtgaggtaagtggcttggctagaggtacggaagtcgttaatttaggacatccaattgaagtacctgttggggaaaccgtccaaggaagaatgctaaatgtatatggaaaagcgattgacggcaaaccagaaccagctgcggaagtaaaatggccaatattccgtgaccagcctttacttcgagagctagatacgaataaagaaattctttacactggtattaaagttatagatcttatttgtcctattttaaaaggtgggaaaacaggtttattcggtggagcgggtgtagggaaatctgtcttaatgcaagaattgattaataatatcagtatgcttggtggtaactctgtatttactggggttggagaaagagttagagagggaatcggcttgtataaagaattagaagcaagtggtgtgctccctcaaacaaccgttgtacttggtcaaatgaatgaatctccaggtgtacggatgcgcgtggcattaacaggactaacgattgcccaatatctaccagatgaagcagaaccaacatgtgtcattctcccctcgatgctgccttcgcctccctcccccccgggcccccgcatccccctcccgccctccgctccccctcccctcctgcctgctcctcccgccccccccctgtccttgtcccggctccgctccccnccggccctcgcctccctcctccccccgcgcgctctccggctgcctcctccgtcccgccccccccgcttcctctatccccccatcaaccaat

SEQ ID NO: 3769 - DNA, 5097 bp, Listeria monocytogenes 4b
  misc_feature (1)..(end): n can be any nucleotide: a,g,c or t/u
ccttgcactcgtgcgctggaaagtaagaacagccattgcatcacttgcaataacgttgaagttttcgccttttccgattagtaatgggcttttgttttttgctgcgtatagtgtttctgtatcggtttggtcaattaagcagatcgcgtaagaaccatgaagtaacgataacgcttttttgaatgcttctttagtcgaaagttctgctgcaaagagttcaataagctgaacgattacttctgtatccgtatcactaacaaatgaatgattttttaagtattcttcttttaaaagggtatagttttcgattacgccgttatgaaccattgtaaaacgaccagatttgctttggtgcgggtgggcgttttcgtgatttggtttaccgtgcgttgcccagcgtgtatgtccgattcctgttgtaccgaatgcatcacttggtacaaggctcgcaaggtctgcaatccgtcctttttctttaactactgttactaggtctttgtcttgcaaagcgactcccgcagagtcatagccgcggtattctaatttttcaagcccttctaataaaatgccttttgcattatctgttccaatatatccaacgattccacacatagtccacctcctccaataattaacttgagggcagacttatccaatttcaagccctctacattttttggtttccttggagggtaaaaaacatgtttcattactactctgtccacttggtcacccaagtgatttgtaagtaagacttaacgactgcatgcacagccgggagactcccgccgaaacttcgattaatctcctcctcgtcaactgactgtttacttttcagggatttcaccttcaagtattttcgtcccaatcagttctggcgcttctatttaattgtacgatcctccttcactacttttcaaggaaacaaattcattttacaataatatgtatactaggtcaagcattatatatagccgtttgtttaaaattggtctatacattgacaaaaaataacaaatgactaataatatagttatgatacaaaaaggagcgagctgaatggtttttgcaaaaaaattagttgctagtattgctgttttcatttcacttggattcatttatttccgagaaagtacagctgtcgcatttgaaagtacaaatactgcttcctttcttccttctaccggagatgcattttcggtttggccgattgttattggagtggtgcttgtcgcgcttgctgtcgtcctatttattaagaagaaaatataaaaaatcgtttgagagcatgagatatgctttcaaacgatttttttatgggtgacttaggtaaatggcttgctttcccatagcagaccagccttcttcaagtacacttctttttacggcacggtttttatgtccatatggatcattaatataaaaattgtttttatcgaacccggtaattaccacactgtgcatcgaatacgtgattttctttttaccttcttttgtttggacggtttgccagtttttgggtgcatggtagtcggtggtagtgataatccatactggtgcgcctgtgctgagtacagtaatgatgtcttgaatgctattcccgctaatatcgtggacgtgtgcttcgttaacgtatttagcggccagattagctatgggagcatgattcacgcctagaccagggctatcgccgctaatgctcccaacaaatgctttatccggattaccgtgtaaaccattttgttcgattggtgttgttgggagattattcgctaactcatttttcgttacacgctttccattgaattgtaagagcattgctaaactcgttacttcgcagccattaaaaagcgtaggagcatccatttgattcactagtggcacatctaatcttacattaaaaggttcgttgtctaatttataaacgactttggcgctttcgagtttgacggttggtgaataaaaggtatatttcgtatttagaagggtcaaactaaatatacacgctgtaatgacaagcagtgattttatccaaattcgcattatacatgcttcctagacattttctgctaggactggctctcctggatcttttgtttctgattctggctcttctgttacttcgaccgcttcttcgctcacttcggtattgaagttggcgatatacccttctaatgaaccagaaattttttgcatttcttcggagataacaactagctcgtccactttcattttgtttacttctgcgaattcaagtgcagcagtggatttttcaccgatttgattggaaatttctgttacgtcgctaattgacgtgttgacttcttcaattcccgcagccatttcttcggtttcttgagatacattttgcatttgagcggaaatatcattgacacgattgagtaagtctgtgaaagttgcttccgtttcagaaatgattttttggccagcttctgattcggaaagacctgtgttcattacttcgatagtagtttttgattctgtttgaatttttttcagaacagtattaatgtcaacaacagcaagtcgtgattgttcagctagtttgcggacttcttcggctacgactgcaaatccacggccatgttcaccagcacgagcagattcgattgccgcatttagggcaagcaagttggtttggtcagcgatatttgtaacggtatccagcgctttttccacttcaccaacgcggttaactaattgagaaacaacgtctgtacttgaacgcataacgccactgatacggtccatttgggacacgagattattgataacggcaatgccatcgttcgttttttctgcggaatcttttgttaggtcagatactttaagcgcgtattcagccacattttgaacgccgccagtcatttgatccattgcatccgtgctttctttcatgctgccgatttgtgtttggatttgctcacccatcattttcatttcgatgtccatttctgtcgtcattgcagaaataatttccgaactaataataacgttatcactggaagatttaacgtctgtagaagcttttttaacgtcttcaatcattaatcttaggttttcgctcatttcattcaagtcgtttgtaatatcaccaagctcgtctctaccgttataagtgctgcggtacgacaaatctccactagctactttatgtacagctgtttgcaagtgacggattccttttagaatcactcttgtaatataagcattaaaaatgaatagagaaattagcacggcaataataactgctgtgaaaatgatactgatttttacaccaaagtcagaaattgcttgagaagaattttcgacttctttgtagttcatttcatttaaaacgtttaattgtttagttgcatcgtcaaattttgttttgacgttttggtagtatctgttttgcgctccaagtagttctgcgtcgtctagtgcgcttgatgtgtcactgattactgaggatgcggatgatttcatgtccgctagtttttcttcaaagtacgctaattgttttttatcttctgctgttaaattggcttttttgaaattatgaattgcttggtcattttcggcataaagatcatcaatatcttttataagagctgattttccgttaatagtgtcgaacatggtcaggatgtcgatattgatttgcgccatgtttgtttggatttttgcgatttctttcatcggtgcgacattattatcaaccatattatctgaaagtgttgctacatgacgaaagccaagaaagctagtcgcgccaagtccgattaacatgatggtcgttataacaatattgatgcttaattttgttttcaatttacgatttttaattaaattcacccattccacactcctattctctaattctaatttattatctcatattttttaaaaaaactccatattttattgtaaaataattagttttaataaaaaaacgttataataattagcgaaaatcggcatgaaacgggtgataatgttatttttttatttattttttataaaaatctgcgtaaaatggttttaagtggtggcatttttgcgaaacgatggtcttctaagactgattggatttcgaatttagtataaccgagtgcttcgtccatcacgattttaccaggtagtggagcggctgcactgtccacggaaacgtcgatgattactggcttagttgctagtttagcattttcgaaagcagcttctagatccgccattttttctactcggaaaccaattcctccgcaactttcggcgaattttgcgtaattgatgtctggtagatcgatggcgtagtttagttcaccagctgattgttgttcatatttaatgaatgaaagttgttggttgtttaacacgacgacaatcattggcatgtttaaacctactgcagtgacgaaatcttgcatgaccatggaaaagcctccatcaccgacgatggcgattgcttggcggtctgggaatgcttttttggcagcgatagctccaggtaaaccgcagcccatagtaccaagccacgcggaaacgataaagtcattttgtggggctaaatgtaaataacgagtgctccaaacagttgcagttcctacgtcgatagagaaaatggcatctttatcagcgattttttggatgttcgccatcacgacttctggggcgattggatcggttgtttgtgcgatgtcttcttctaaccatttccaccattcttgcatgttttcttggcatgcttgaaggaatttacgctcttctacaggtgcggttttcgcggttaaattaccgatgatttctgcggcatcgcctactaaaccaactgttgcggggaaacgtttgctgattttggctgggtcaatatcgatttggatgcagtcggctttttttggtaaataatcgctataagggtaatcattcccgaacattaatagtaagtcagtttcttgcatggcttcatatgctggtttggttccgattttaccaaggtttccgagtgcatttggatggttatctggaacaatggtttttgctggtaaggaatgaataatcgggattttcaatttttctgagaaggcgattagttct

SEQ ID NO: 3770 - DNA, 5015 bp, Listeria monocytogenes 4b
  misc_feature (1)..(end): n can be any nucleotide: a,g,c or t/u
tcaagtcatctgtgtccgcctgtttacttagcgcatgcatgtacgtcacgttaatttcatacggactcttagaaccatctggattttgcttatatgaaacgagcgcgccttcttcctccaaatcattcactaaagccaaaatttcagcttctggaataatgccgcgcactggatttaacccaatcccatcatgtgaggcaaggaaattaaagaatgttcgcttgccttctggtagctctaaattcttcgcccagttacggaggaattctgcattaccatgatgtatcgcatggagcacaagtggtggaagcgggaattgataaaccatatgcgcttctttttcaccatttccaaaataactaatattatcaacatgcggcacattggtttcggttataataatcgtccccggagctgcaatgtctactaaatctctaaataatttcacgatttcatgcgtctcttctaaatgaatcgagctcgttcccggcactttccacataaagccaggcgcatcaagtcgcacatattccgcaccttcttctaaatagaacatcaaaacatcaatcatcttgtaaagcacttccggagaagcaaagtttaaatcgatttgatcctcactaaaagtcgtccaaatatgccctacttttcctgaatcaaattgaaatggtgtcagcactggtgtcgcacgtggccttgttaccgaactaaggtccgtctttggatccatttccacaaaaaagttcctaaactcctcgtcacccgccaaatagcgcttaaaccaatcacttttcgccgacatatgattacaaacaaaatcaaacatcaaccgcgccgactgttccatctccttaatatcttcccaatcaccaagttccgggttcaccgctttataatcgatgaccgaaaacccatcatccgaagaataaggataaaaaggcaagaaatgaactacctcaaaagtcgattttaaataactatcatacattttcttaaaagtttttaacgtttttttggattcctctttaaattggtccccatatgtaattaaaacaatatctttctcgtcccactgatcttttcgtgttaactttcgttgttgcgtttgctgtacccgcgcttcgattctagctgccaaactatctaccacatcttcggcatataaacgcgaaagtcgttttcttaaattcgtcatcatttacctcctaaccgggagcgctcccacaagaagaattatagtatggaaagcgctttctgtcaaacacaatttttaatgttttttctaacacgttgataatagcgagttttctctcatatataacatctagttggacatttactagaaaattgagtaatataaacatggatgataatgaccggaaccgataccggaaacaataaagagaaaggaagattaccttggcatcaaccatatatgatatagcaaaacatgcgggagtttcaaaatcaacggtatctagagtactaaacaatcaagctaacatttccgaagaatcacgaaaaaaagtactagaagcgattgacgaactaaactaccagccaagcaaactagcgcgcgcacttacctcttcgggctttgatgctatcatggttatttcaaatcgctctactacaaccacaaccggaaacccatttttttccgaaataattcaatcgatttccactcaagctgagttggaaaatttcgacctaattcttcaaactgctaaaaacagcgaagacgaacttaaaaaatgcctctccaaaattcaagaaaaaatgataaaaggcattattatgctaagttctcccgctgatgaagatttttttcaccaattagacccatataatatccccatcgtcgttaccggaaaagtagaaggtcattacaaaaatatatactctgttgacaccgacaattttggcgacagttatgctctaacaaaacatttaatcaagcaaggtcatcaaaaaatcgcttgtatccatgctccactcgattatcacgtgtcgatagatcgtcttgctggtttccgcagctgcctgtttgaccaccaattagatttacgtaacgactggattattgatagcggttatagtatagaagatagctacaaagcagcactacgcctaatggaaggcccagataaaccaaccgcagttttcgcaaccgacgatttaaaggtccttagcatttacaaaatggccgccgataaaaacttacaaatccctgcagatttttccgtcatcggctataatgataaagtagcgtcatctttcctatcaccaccacttacttctatcgacattccaatcaataaactaggaaaaaaagcgactaacttattattccgcctaattcatcaagataaaaatgtaccaaaaacaactattattaaaaccgaaatgattgaacgtgaatccattcagaaaataaacgtctaaacttattttctgagtttactggtcctgtagctcagttgggagagtatcaccttgacatggtgggggtcgctggttcgagaccagtcgggaccatttataaaaaaagcacccttttataaaggatgctttttttattttatttaaataacttacctaatttcttaaacaatccatcctcaatgatatcaataccgataccccagttactcttgagaatttctttattagcttccacatattcttccaaatccttctctttaatagtgagattgtgatatggacgatattctaaataacaagaagctccgtttttgtgaattttcttcgtcatacgatggttcaaatacttagatttgatgtcacattcttgacgtgtgtagcgttcttgctgatcaattgatttatctgtcgtcaaatgaagttctgttttgatgacattccgatcaatccaatatggaaaatccttatgaaaatgtttttccgcaccatcatcaataaaattattccaattccaaaaatgtaaataacgctttttattttctacaatatatggatcggaaatagttgctttataaattatagaaagctcatttaagtctttattatcttccacaatttgaatggatgtattactaaaatgactatcaacttcattttcttcatattttttatataaagtcatattgctataaatcgaaaaattatatcgattgataatgtctttattggaatcatttttaaacatttctcgtgacccgtttgccattccaccgcgtaattttctttcaaaagtaatttcagccgcattatctttaacatcgcagtaaaccacttcttccacagatggaatttcatcttgaaatggctcttgtttttgcaattccgcccctggtttaatttccaaataatacataaaactatttttttgacgattagccaaaaatccttgatcactactcattgtagcatcaataaaatagacttgattattatgcgttatttttaaaatcgcatggttaaagttgaatggtgacggtgtataaactggtaggaatacatcactaccatagttaaccaaaataagctctgaattcacgtctaaataatctaaaatcactttcaaaagaactgttttcgccttacaatcgccttgtttcgttttataagtcacttcagcagcttgaggctcatgaccatccatctctgtttcattatataaatagtatacttctttttgaacaaaatcgatggcatgcttaattttatggtctaatgtcggtaactcatctagttcagccactatatcagccgcaaattcagcaaggtttacttgatagaatttttgataaatgtcactgattgtttttgtaatttgcggatacgactgctccgtaacaaaatcaacaaacggtgtaatttcaagttcttttgcgtcttctccaatataatcttctttttcgattgtataagattcgttatgttcaaccataactttgtctttttctaagatggcgcctgcttcatctcggaaataatggaaattcgcttctaattttttctccgtttcattttttaattcaaaacggtattttccataagcccagtaggaatttggcgcggaataaatccagcggaaaaagtcattgcgaatgctgctttcttcatatttacgctcaattgtcgtctccacaataaagatatcatttaaatgtaagtcacgaataagtacggtcacttttttctcatcattaaaactcgcttgattttcatcacgaacatagtcaagtacttttacattaatgtcatccaatttatcaatcactttaccatcacgaacaacagataaagtgtgaatgtataatacctcttcttctgataaaataaaactcgtcttgccggctgaattgagcatgttgggttcatttaatgtatatgccatcgaagtataactcgtgcgtgaatttggtttagccgtttctacgatattacaccagaagcagtaatcacgttcttgcgcaatttgtgcatcgtaaaaagttttatcttgtgtctttaaccaagaatcaatgttttcttgttttgtttcaggagaacttaactctggttttataaaataatattcttttgtcattgtgtaatctccttaagtgttttagataaccttattctagcaataaataaatagaacaaacaaggcaaaatctttatgatataataacttttggtttatctacactatttagtaaaaaaatcgacacatttactactgaatttcatctatccacgaaaacaattgcacatcttggtatgtctcaccaattttttcataatcccgcagtaaaccttccttcgaaaaaccaagcttttctaacaatgcaatagaagcactatttcttgggtctacttttgcttcgattcggtgcaattcaaatgattcttttccccattccatcaacgctctcactgcttccgtcgcataaccccgtttccaaaagcgtgtacctagatcataggcaatttctgcccgatggttttcatgatcaatataattaaatccgcagtgtaccaat

SEQ ID NO: 3771 - DNA, 4004 bp, Listeria monocytogenes 4b
  misc_feature (1)..(end): n can be any nucleotide: a,g,c or t/u
agcgccgtccaaattggtcctggtgcaaccgcattaattcgaatacctttttcccctagttgtgccgctaaacttttagtaagcgaaattaaactactttttgtcattgcatagtcaacaaggtgagcgcttggtttaacgccttgaatggaggacgttaaaatgatacttgcccctgcttttaagtaattaagtgcttcttgaattgcgaacacaacggagaagacgttcacttcaaatgtgtcacgtaattgttcagctggaagtttttgaatatctaattgatattgctgtagtccagcgtttagcactagaatatctagtccacctaactcgttatatgctttttttactaaatctttcgctaaaccttcttttcgcaaatcacctggtaataagacacatttctgtccagcttcctcaacaatcgctttaacttcctgtgcatctacttcttcatccggatgataatttatcgcgacatcagcaccttctctagcataggcaattactgcagctcgacctattcccgagtcgcctcctgttacaaaggcttttttcccggttaatttattcgcgccttgataacttgattcgcccgtatctggaacaggcgtcattttactttgcaaaccaggataatcctggcgttgcttttcaaattttcctgtatggtatttgtttaatggattttctttattcatcataaaaacctcctatatttttgcaacgtaacccatgactaagtaggctacgaaaattattaaaatggccaatataagtatccaccaaatattagcgccaagttttcgcttcacttttttatttcccattttcactacccccattacttaatgtcttccctccagttttacgctaaaacgtttaacatcaaattgaaaaagaattgtagtaaacatgaaaaaaagagaacggaaatccgctctctttttgaaaaaatcgctattaacttcgaagtcctcgccctttactaattaaataccaacaaatcgagtaaagaacggcactaaatacaacaagaatggatagagaaattgctactggtacatctgtaacacctaggaaaccgtagcggaatccggaaatcatatagacaatcgggttcactttagaaatcgcttgccagattggcggtaacatcgaaatcgcgtagaatacgccgcctagatacgttaacggttgtaagacaaaagttgggacaatggatacatcgtcaaatgatctagcgaaaatcccgttaataagtcccgcgagtgaaaataaaatcgccgtcattaagaaggtaataataccaatcgtccacgaatgaatgtgaatcggcacaaacaccatcgaaataagcgtgacaagtgctccaactaaaacacttctaccaatcccaccaatcaaaaagccccaaataataatatgcgttggcaccggcgcaacaagaatttcttcaatgtttttctgaaacttttgcgagaaaaaggaagacgatacattggcgtaagaactagtaatgacggacatcataatcagccccggaacaatgtactccatataagaaaagccattcatttccccaatgcggctaccaatcattttcccgaaaataataaaataaagcgaagtcgtgataactggcggcacgagtgtctgtacccaaattcgcatatagcgattcgtttctttcgccgctagactttttaaagctgtaaaatatagattaaacatgtttctcccccacttgatgtttttcttctgtaattttcaagaatagttcttccaggcgattcgatttattacgcatcgaaagcactttaataccgtgttcgcttaattgctcaaagatatggttaactccctgattacgttccacttccacagacaaagtttgcttatcttcaaacacatgattataacccgtaatttcgaaagctccctcatacggttctaaatcaaaaataaacgtttcaaattgcaatttagaaagtagtgatttcatgctggtattctcaattaactccccagattgaataataccgatattacgacaaagcatctctgcttcttctaaataatgcgtcgtcaaaataatcgtcgtaccgctttcgttcaactctcttaaaaacgtccacatctcacgtctaagttcaatgtcgacaccagcagtcggttcatctaaaataagcagcttcggttcatgcatgagagcccgcgcaatcatcaagcggcgtttcatcccgcccgaaagcatccgcgcacgttcattccgtttctcccacaaattcgattgttttaaatatttttcgctacgtttgatagcttccttacgagaaacaccgtaatagccagcttggttaacaacgatttgctgaaccgtttcgaacggattaaagttaaactcttgcggaactagtccgatttgctgttttgcccggacaatatctgtatcgagatcatagccaaatacgcttacttgaccagatgttttattgactagtgaagtaataataccaatcgtcgttgatttcccggcaccattaggaccaagcagtgcataaaaatctccttcttctaccgttaaatccacaccgcgcaacgcttcgaccccagtggaataaatttttcttaacccttttatttcaagtgcataagtcatgtaattgctgtctccttataaattatgattcctttattttagcacttatttgccaataagaaaaaacaatcgtcttttcactgaaatgaacgcgaaaagacgattattttgatttaatatctactcatcgttcttcttgatactcctaaaattagcaagaaccaaccaacgacaaagcaaacaccaccgataggcgtaatcgcacctaaaatggatactttagaaatacttaacacatacaaactacccgagaaaaagacaattccgaccgaaaataaaatcgctgcccatgtgtaaagccgactagcttgtttttccatcaatagccctacaactaaaatgcctcctgcgtgaaacatttggtactgaacgccggtttcccaagtactcgcataacttccaagtacgtcttttaaagcatgtgccccaaaagcccctagtaaaactgccagccctgcaaaaatggctcccgtaataattgtttttttcatagttaccccctaaaaatcaagcaacgagtctccgttcgcgccgtcttctaactctattttcttcccgtccatacttgcaatttgcgccggttctgctgactgaatagcaatcggttctacagccgcagttgtctcatcgcctgtttttgcaagctgaacaagaagcatcaaaccatgcaaatgcttatcttgactcgcttttgtggttgctgcttttgctttcgctaattcgttttccatttgttcaaaaatctttgaatctgcaataatcatttttcctcaacctcaattgttttaataacgcgtgctgggttgccggcaagaacgacattatcagggaagcttttcgttacaactgcgcctgaagcaaccacgacattatttccaagcttaacccctggattaataattgcccgaccaccaatccaaacattatcgccaatttcaactggtttaccaagctctagcccactattacgttctactggatcaagcggatgcgttgccgtataaatatgaactccaggcgccatcatacaattatcaccaatatgtacttcgcaaacatctaaaataacacaatcaaaattagcataaaaattttcgcctacatatatattagaaccgtaatcaacacgaaaatcaggttccacatatacattctcttttgttccgccgaataggcgcttcagcacgcttgcacgggactctgaatccatcgcatcgttaatctctctgcagaacttacgtgcacgatttcttccgtgtgcgagctatctgtcgctaggatcatacattctttccagcacagtggcggccgctcaagcatggagcanagtgcctacagg

SEQ ID NO: 3772 - DNA, 4562 bp, Listeria monocytogenes 4b
  misc_feature (1)..(end): n can be any nucleotide: a,g,c or t/u
atcaggattataaaaatgagataaaaacgtactagtatcataatatggatttttatgatccgcgtcatatattccttgagcaatttgtttgtcgaaatttttaagttcattcattaaattagctcgcatatgatctacatctttagctagtattttttctgcttgtttaaaaagccaatagtgcgtatttacgtcagtatttgtcggattatccgcggaccaactaagtttatgcggtaatttgctgtcaatatcatgcggagctgcggggggctttagatattcatcacaacaggcacttgcttttatcgttacaggaaagactagaacacttgcggtcaagcacatacctagaaccacttttttgaacttcacatcactcacctcactttttctttcattctgcgtcttcaactattttttcttaattgaatgattttgataaccgctcctaaagagaacacgccaatagctaacatggcaagaattaacgtcgtatggttcactggttcttcttttgctttttcgtcttctgcacttttagcaattaattttccttcttcaatgccagcagaacgtttttttccgttcacattattagctggttcgctttctcctaccactttttcctcggtttgcggtttcatttcctctttatttctttctgtaacttctttttggattactggtaggctcggcatatcaattggccgattgtttgtctctgcttgtttttctataaatggtgctttattttccccaagctcagtttcttgcgctttcgtgataggaagtgctgctagctttggcgcggtattcacaggggttattttttttggtgctgttttcgttgtagtttttttgttaaacacatttaatggctgtggcggatttttaaatggtgcttttttagttacgtcagttatcagagccggcgcgcttattttcgatacctttggacttaacgaaggaaccgggctgctagtaaacggatttaatggtaaaaaacccgcatttcttgagtgttttcctgttcctctatctcttaaatcagctaggcgatcaatttcttcttctgttgtctcgctgttttcgtcatctgtaaaatcgccactattcagcgaactaaattcttcagatgttggtataccacctctcccgttcaactcttcttctgttggcattggtggaaaatcagagaaattttggctatggcgattaatagcacttctcaaactagctaaatccccgcttgtaaaactagaatctagcgaaggtgctgtttcccgcataatttctagttcatcttctgttggaggcggtggaaattcgaatgagctcggttccgatgtagcaggagcattaaaaccaagaagcatcggtgtctctggcaaagcaagtcttaactcttcatccgtaggcggtggtggaaagtccgaagcatttacctcttcatttttcttcttagttaataattggtcaattaaccctgcacttttatcaacaattgctttcttcacttcgggattttcgtcgattttatcacgtacccatttacccgcatcttttatttttttaaatactttagggaaaaatggttgttgatttgcttttaaaggttgtggtgtagactcatccgctgactgcatgctagaatctaagtcactttcagaagtatccgtaactgacgctttcgccacttttttcttagttgcttttgttggtttatccggataagtaaggctttcaagctcactatccgatgatgctatagctttccttctttttttaatttccgcggcgctatccgatggcaaccctggatgacgacgctccacttgtatagctggtcggtcggatcctgaagcttcttcatttatagccacattctcgctttgttcactgttgttattattaatatttggacctttttctgcttttgctttcaacattgctattaggtctgctttgttcgtatttttcactttattcgatttttctagttcctcaatatcacgtgaacttacttcacgtgcagtttcgtatcttggtcccgtatttacctcgcttggctgctcttctgttttttcttcttcccattcatctgtgttcagactggaatcttcgctatctgtcgctgcaaatattatgtcggggttaatcgtaatgcagttggcggtaatgaaaactaccatcatcgcacgcataaatctatttaatcccacttatactccctcctcgtgatacgctaatacaacctttttagaacaaggaaaatctggccttcattttcactaatttattccgttaaaaattggattagcagttggttatcttcttaattagctaatttaagaaaaaaatattcatgaattattttaagaatatcacttgaagaattaagttttctctaacatttgttaatcagttaactccgaccgcttcccaagcttccgcaacttttttagaagcatcttcaccatataaatctttcgccgcttgttggagtgcttttttcgcatcggtaaactgggctttttttgttaaatagtactttaaggcgcggaagtaaagttgttctgttttttcttttccaagtttagtgatcgtattgtaggctgctttattcggtataccactattaaaatgaactccgccccagtcgccttcctctgtgattggaagcgattcataatccttcatatgagccgcttgattatatttgtcaggatctttgatgcttcttattcgcccatctcgtaacccacgcacacagacatcctcaccaatcaaccaatgatttggcgcaataaaataaccaaagacatcggcgaacgattcgtttagcgcacctgattgcccttcgtattctaatcctgccgaatactggataaccgcatgcgttagtttatgaccaacaatcgttttggcgcatgaaaatggtttgaaattctttttgtccccatctccataaagaatttctcggccatcccaaaaagcattattgcaattcaagccataatgaacaaacgaatcaatttctccacctttaccatctagactctctagttgatggacatttttatagtaatcgtacacttcacttgcgtaaaaatgagcatccaccgcggaactaaattccggatccgtaaacatattcgttttattcgacaccacttttccaaaagatgcgtccgttttatggtttaaatcaaaagttcttatgagtcctttatgagttctatccactaagtaaaacaggtcatttattttcatgacatgtaatggtctctggagtaatcggttagctcctttaccaagcgcttgaaaatctttgtgggtatcagcccgctctacctcggaaagcatattttgtttttttaaaattgcgccggtttctgcatccacttgaataatccaactcgcaacttccggctcagcaaaaatcaattttatattataaactaagcgtttcgttctggaattgatgatgatttctttttctttcactggatttccaatataacttttcacatgagcttcactctgaccaatggcttcaaatgctttttcaatagcatttttttctgtgatttttatttgattagtaatcctaagctgcccttgctgtaaatctccatttataaaagtgattttattatccggtgtgacgtggacctttatttcatcattatcagtcaagtaaccatcagaacttagcgcgagcgtataatgcgtaacgcctagcttatcttttgtcatatcaagaattttaaaatttttataaaaatcttttgcttcgcaggaatctggcaaagcttttaaatcagcagggttccttttggcttgtatatcatttcggagcctttcttccccgacagaatccgcttttaccgccatattgaaatgagcctgaaaagctattaccatgatgatacaaataagtttactcttcatttcaccgctccttttcaattcgtaaaagtaagtttaagccacctacaactaatctgacagagagagttaaggacacgttttttagcatatgtgggaactaaattatacgttttgcagtagaaactataggtggcttaaactatgggatatgcttatattatatggaaaaacaatcagacattcttttacatttgttaattcttctagaaaaattaaaaaaataagcctgtttctacattcttcataaaataatttatgaaaagtgcaaaacaagcttatttttcgtgtgtgtgttaagcggttttattcttaatttttttattaatttttaaaattattcgattggattatctacactattactatatttcggataaagtgtagtgccccagatggagatatttctatttttcacaagcggtaggttccggtcatcaattaccgttctccaccattcccaagctaaaccagtgcattctttagcgtaaacattaatatttcttgcgttacctggcaaatagatggacgatgtgaaatgagctagcttacttttattctttccagcacacgtggcggccgctcaagcagcatgtaggtgcccaaag

SEQ ID NO: 3773 - DNA, 4896 bp, Listeria monocytogenes 4b
  misc_feature (1)..(end): n can be any nucleotide: a,g,c or t/u
agtcgcattagaaaaaacaccagatttacttccagttttaaaagaagttggtgttgtcgatagtggtggacaaggtcttatcattatttatgaaggattttatggcgcactaactggcaaaatggctgaagctcctgactatatggcatctatgggtgagctaattaatgccgaacatcatcgtcatgtgcaagactttatgtcaacggaagatattcattttggttactgtaccgaaattatcgtgaaaatcaacgaaaacaaacccggtcaaaaaccttttgacgaagaacagttccgtcaagatttaagtaaactgggggattctctactagtagctgcggacgatgaagtagtaaaagtacatgtccatgtggaacatcctggtgaagtactaaactacggtcagcaatacggtagtctacttaaaatgaaagtggaaaatatgcgcgaacagcatactgagattgttggtgatgacaaagtgccagcaaaagaaaaagcggcttatggtattgttactgtttcagctggagaaggattgaagaaactatttgagagcatgggagtgtctgttgttctttcaggtggtcaaacaatgaatccaagtacagaagatatcgtaaaagcaattgaatcagcaaatgcagaacaagtttttgttcttccaaataataaaaatatccaaatggctgcggaacaagcggcacaaattctaggagatgataaagttcaaatcatccctacaaaaacaattccacaaggacttactgccgttctttcattccaagcagatcaagatttcctagctaatgcagaagcaatgaaagcagcaattgaagacgtagcaagtggccaagtaacgacagctgtacgtgatacaacagtagaaggtgtcgaaatcaaaaaagacagcttcatcggtatggttgaaggcaaaatcaaagttagttgtgcaacattagaagaagccgcttacgaaacactggaaaaactacttgatgatgatagcgaaatcattactatcattgttggtgaagatgcagatacttcaaaagcagaaacgcttgctgataaagtaacagaagcattccctgatgtcgaagtagaaattcacgaaggcgaccaaccagtttatccgtatatttttgctgtagaataaagacgcctctgtaaatgaatagaagaaaggatgattttagtgaaatttaatagcgtatttgatattattggtcctgtaatgattggtccgtcaagttctcatactgccggtgctagtcgtattggtgccattgcacgagctgtttttaatgaacaaccatcccaagtagatattcatttatatggttcttttgccaaaacctataaaggtcatggtactgatgtagctttgattggcggattgctcggctttgagccagatgatccgcgcatgaaagaatctccgaagcttgctgaagagtggggcatgcgcattcagtttatcgaagaagtagaagagccacctcatccaaatacggtaaagctagtattaaaacatggtatgcaacaaatgacattaattggtgcatccattggtggcggaaaagtagagattattcgcttaaacgaatttgaactagaatttactggaactgctccagctatccttattttacatcaagacaaatttggcgcgattgctgcagtatcttccgtgattgccgaccataaaatcaatatcggacaaatgaaagtgtcccgtaaagtaaaaggcgatgaagcgttaatggtcattgaagtagaccaacaagttgaacaagctttaattagcaaaattgctgaattaccagggatttatcaagtagcaagtgtcatgatttagtagttttctagtaaatcggtggctttcgctcgatttgtgtaaagccaaatgtgcgtaaacaaaacgtgcatttggctttattttgagttgtaaatcaggtatgttggtaaagggtaaagaaagtgagtgtggacaatgtttagaactgtagcagaattagtagatatcgctgaacgcgagaacttaactattgctgaaattatgatcaagcgtgaaatgaatatttctggtttaccgcgggaagaaataacagctgcgatggaacggaatttagatattatggaagaagctattcgtgaaggtgaggcgggagttacttctacaactggcttaacaggcggagatgccgtcctaatgcaagactatatcaaaaaaggaaacttcttatcaggcgaagtgttacttgattctgtagcaaaagcaatcgcgacgaatgaagttaatgcttcgatgggcgttatttgcgcaacaccaacggcaggaagcgcgggggttgtaccgggcgtacttttttccttaaaagatcgtctagaaatgtcgcgtgaggatatggtgaactttttattcacagcaggtgcctttgggtatgttgttgcgaataatgcttttataagtggagcggctggtggctgtcaggcagaaattggctcagcaagtgcgatggcttcagcggcgattgtagcagcagccggtgggacgccagaacaatcagcacacgcgatggctatgacaatgaaaaatatgcttggacttgtgtgtgatcctgtagcagggcttgtagaagttccatgtgttaaacgtaatgcccttggttcctcgcaagcaattatttcagcagatatggcgctcgcaggtattaagagccgcattccatgtgatgaagtaattgaagcaatgcaccgcgtaggcttacaaatgccaagctctttaagagaaacggcagaaggaggattggcggctacaccgactggacgtgcaattcagcggaagatttttggactgtcgccagaagataagcgtgagtgaacttaaacgaatcccgacaactgaaatcaaaggaattggcgaagaaacagcgaaaacgttaaaagagttaggtttatccaccgtgcatgatttgctttggaacttcccgtatcgctatgaggattatcggttgcgggatttatcagaagtggcgcatgaagaacggattaccattcaaggcgaagtcctaacagaggcaaccgttgctttctacggtcgcaaaaaatccaagctctctttccgcgtctcaactgaagggcaagtcatcaaaatcgattttttcaaccaaccctatttaaaaagtaaaataagtgttggcgaaacagtgacaatctctggcaaatgggataagagccgcgcccaagttacagccagcaaaataaaaataggcgctgtcgaaagtgaagaagaactagaaggcgtttaccgtctaaaaggaacgctacgcaataaaacaatgcaaaaatatacgagacttgcttttaatagttatagtcaagatatagaagaagttattccaagcaatttattagaaaagtatcaattaatggatcgcctagaagcagtgcgcattctgcattttcctaaaaataatgaggaattgaaacaagctaggcgccgaatggtctacgaagaattcttgttattccaattgaaaatgcagtttttccgtaaaattgaacgcgagaaatcaggtggaatttcgattaattacgatgtagaagatttgcgccattacattgattccttgccatttccactaacaaaagcacaaaaacgagtagtcaatgaaatttgcggtgatatgttatcacactttcatatgaatcgtttgctacaaggagacgtgggatcgggtaaaacagttgtagcatctattgccatgtatgcagctgccaaaagtggcttccaaagcgcactcatggtgccaaccgaaattttagccgagcaacatgcgaattccttagtagagctgttgcaaccttttgatattacagttggcttactaacgagtagtgtgaaaggcaaacagcgcagagaattactagcaatgcttgaaaatggctccattgatgttttaatcggaacgcatgcattaattcaagacgaagtaatttatcatcgcctaggtttagttattactgacgagcaacatcgatttggcgtagcgcagcgtcgtgttcttcgtgaaaaaggggaatatccggatgttttatttatgaccgcaaccccaattcctagaacgcttgccattacagcatttggcgaaatggatgtatcgattatcgatgaactcccagctggtcgaaaagaaattgaaacttactgggtaaaacatcaaatgcttgatcgcgttatcggttttatggaaaaagaaatcgacaaaggccaccaagtctacatcatttgtccgctaattgaagaatctgaaaaactagatgtgcaaaatgcgatagacgttttcaacattctacaaaataaatggggcactaaatatattcctggtctaatgcacggtaaactattaccagcagataaagagcaaattatgcgcgactttaataataaaaaaattgattgccttgtttcgaccacagtagtggaagttggtgtaaacgtgccaaacgctaccatgatggtcatttacgatgccgaccgttttggtttagcgcagttgcatcaacttcggggccgagttgggcgcggagcagatcagtcttactgtattttaattgctgacccaaaaaccgaagtcggcaaagaacgtatgatgattatgtcagaaacaaacgatggcttcgttgtcagcgaacgcgacctagaacttcgtggcccaggagatttcttcggcagaaaacaaagtggtgttccagaattcaaagtagcagatatggttcacgattaccgggtactggagatcgcccgccaagatgccgttcacatgatctttgaagaagatatgttagagaacaaaaactacgaaaaattagtagcacttctggagg

SEQ ID NO: 3774 - DNA, 6242 bp, Listeria monocytogenes 4b
  misc_feature (1)..(end): n can be any nucleotide: a,g,c or t/u
gcatgcagtactcattccgggtagtagcattacttgtggtttgaatatgtcatttttctttgcaattattctttactgttgaactgaaatatttcgttatggagcatctatgcaaaaagaatccgacgaagctttatgattggagcgaaaaaacaatggcaattgtattgaggctagatcgagtaatggccgtccgtataatgtctttaaaccagttatcccaagaagttggtgtagcaaatgtaaacttatccaaaataaaaactggtaaagtaagcgccattcgtttttctactctaaatgaaatatgtagagtcttaaactggcaaccaggtgatattttggagtatgtagcggatgattctcttgaaaccgacctttaaatgcgttagattagccatacttagataaggagcgcgtaaatgaataaacaaaatgaattgcaatctgtattatctaacaagaaaaaagtattaataattggtcctaacggcgctggtaagtcaacttttgctgcaaaacttggaaaatgttatgattttgaagtctgtcatttagataagcttttttggctggagaattggaatgcagttgaaaaagcggatttcgaggataaagtgaacggaattctgcgttctgaaaaaaagtatattatagatggtgattatttctttaatttggagaaaagactcgaacatgcagatttagttatttggataaaaattccattgtttctgtgtgtagcaaatatagttaaaagaagatttaaatacatgacgaatgcgcgaccagatgtaactgaaggctgtgacgaaaaattaaatttatcatttttgctgtatgctttaaagtataataagcgttctggaaaacaaacgaaagaattattggataatgtgtatgataaagagctgtttgtaattgatagttataagaaattgaagagttattggtgataaatagtcaatgaatgcgtaggataagtgtttattggttgtttgcaatcatatgtaatacttcctataatatatattatgtcagctagtttattaagattaagtaagaggaaaatcatcgccttttttcactttcaaaaaagttattatcaatacttagtaagaattgcttaaaacaaaactatttgattacaaaagccttaatcataatcatgattaaggcttttgtaaaacttatttcactcgttttcttcttgtagtgaagatataaactccgctgattaacaaactaacaccgataattaatggtaaattattttcgctgtcacctgtttttggtaactcggaagctgtagttgttttatctgtttggtttacagttttagtgattttcttttttggaatgtttttgtttggtacagttggtgtggctggattgactggttttacaggattaattacaattggtttatctgggtcaactgggtcaactggcggtgtgataatcgagctatctttactatatacataatcaacttcttgactatcactcgtaaatgagccaatgtggttacttggtgttttagttaatttatagcctttaaaagattttgcttctgtttcgaaagttgatccgatgtcaccttttaaaataactggatcagcaagttgatttcctttagtgtctttatacgttacagttacatcttttgcgacttcaacaggcgttgttatttttttatatttgaaaataacggattgtggttggtcggtgtatgttcctgattgatttgatggcacttggcttaattcgtagccgtcgagttcttttacttctgcttggaaagtcgcgcctatttttccagaaagtgtttcggttggggcgatagattcattagttgcttcatctatatattctacagatacgtttgccccttctactgctgttttttcatatacgtaattcacttgtattgtttcagtgtttgttgtgtaggtgcctgttgcgtttgttggtgtttcttttacttggtagccatcaattgcttttggagatgttgtataagtttcaccgagttttccggataatgtgtcggacgttgcaagtgtttggtttgtttcgtcaacataattaacttgtatatttgccttttcaattggagtgaaaggtccggctaatttgtatgattcttgtccaggataagcaactggatcaagtacgttaccagttatggtaaaatagtttagtgtgtctccagcttccagcgttttaggtaattttagacggaaattcacgtcattttcaaccgtatagtcggtgatattatattgtttattgttaaaaagcacataagctgcattgccgggataatgcataggtacttcttgttgtaattttccggtaatatagtcatctccaatatagagttgatccacttgtggttcaggtaaattaagcattaaaggtgctgctttggctgaaaaaggattaaaagtgatacttagaattgtcataaatataataaagctaaatgtaatttttttagtgtgcttcataatgtcctcctgcttgttagaataattacattctagcaccaaaaccgtacaaatacttgtttttgtaagaagtttcacaaaacaaattggcggtttgttcacaaaaaagacaaaaatgaaatcataaaaagctaaaatcaactattagctgattttagctttttactaacattaaatgtactactatcaagctttttcaaggataattgcaataccaataccaccaccaacacacaaggaagcgacaccgatgtgcttattttcatgttttaactcatttaacaatgaggcaataatgcgtgcaccagaagctccaattggatggcctagtgcaattgctccaccgtaaatattaagtttctcttctggaatttttaaatcacgagccactgcaactgactgcgatgcaaaagcttcgtttaaatggaataaatcaatgtcatcgatagaatatccacctttagttaaagcttcatttactgcatagtatggcgcgtaacccataagtgctggatcgacaccaacttcagaggttactttgattgttgcgatataaggaatgttttccgcgactgccttttctttcgacattaaaataattgcggaagctccatcattgataccggaagcattgccggctgtaaccgttccaccttctttgaatacgcttttcaaagtagctaatttttctagagttgaattcgcgcgaatcgtttcatcggcttcaaaaaatgaaccgtctggaagctttacaggaataatttcctcttcaaaaaggtttttttcttgtgcattcgcggccttcatttgtgagttatgggcaaattcatcttgttcttctctggttacggagaatttctctgcaacattttctgcagtaattcccatgtgatactcgccgtaaacatctgttaaaccatcaattaacatgctatttcttagtttttttggatcgatttcttcgccagctagctcgggattaagtaaaagtggtgcttgggacatattttcggtcccaccaacggctacgatgtcagcctcccctagctgaattgcttgcctaccaagcataaccgattttaagccagatccacaaacttcattgattgtgactccgggtactttataaggaattcctgctttaatagcgatttgtctagctacattttggccaagtccagcttgtaatacattaccaaaaatcacttgatccacccgttctggagcaatattggctctttctaaaacaccttttagagcggtagcgccaaggtctactgcactgatgtctttcaaactaccaccaaattttccaattggtgttctaactgcatctattataactacttcgttcatagcaatctcctttaaatgtaatctatccgtattatatcatgaaactagctaaaaactcactagattaagcccaatgtattgtattttatgcatttttctactaaaattaaggtacttacaaataaaatataaaggacttgaatgtacatatgaaaattggaattgataaaataggtttttatactcctgcattttatgttgatatgacagaacttgctgaagctagaaatattgatcctaacaaatttactattggaattggccaagataaaatggcttttgctccgattacgcaagattcagtaacaatgggcgcaaatgcagctttacagattttagatgaagaagatttgaaaaaaattgatttagttattttggcgacagaatcaggaattgatgagtcaaaggctggcgcggtttatattcaccgtttgctaggtattcagccgttctctcgtgcaattgaaataaaagaagcttgctacggagccactgcaggaattaatttagcgaaagattatgttgcgaaacatcctgatagtaaagtactggttatcggatcggatattgctcgttacggcttggcaactggcggcgaagcaactcaaggagctggagctgttgcgatggttattgctgctgatccacgttgtatcacacttgaagacgataatgtgttttatacagaagatattatggacttctggcgccctgtttactctgagtatgcatgtgtagaaggtaaatattcgacggagcagtacattcactttttccaaaccatttgggaaaagtattcagcaaaatttggcaagaacttagaagattttgcagctatttgtttccacttaccatatacaaaaatgggtaaaaaagcgttagatactattattgaaacagctccaactgaggttcaagaaagattgctagaaaattatcgtctaagtacgctttatagccgcaatgtcggtaatatttacactggttccctttatttaagctttatttccttgttagacaatcaagcagatttacaagcagaggataaaattggcttctttagttacgggtctggtgctgttggcgagttcttccatggagtgctacaacctgactataaaaaatatatccgtaaagatgaacatgcggaattgttagcaaaccgtacgaaacttgctattccagattatgaaacgaaattcaaacaacaattacctaaagatggttcgacgtttgaagtggatcctgctagtgacccagcaaccattgtattaactggtattcaagagcataaacgtcaatatattaaaaaataatcaaaaaaccgactaggctaaatcagctagtcggttttactttgagctctttatattttcttggggataaaaaacgaatcacaatgtagccaagcatgataccacaaacattcaggaatacatctccggtgtcaaagaatcctacatgtagcatgtactgcgccccttctacagcgaatatcaacattccagctgatagtaatgcggtgaaaaaacctaattttttgagtaaaaaaccaattggtacaaaggctaatacatttcctatgataatgacgcgtaaattacctgataaaaatgtatcaacaaacccaaaagtatcacttgaaaatccttgcgtgtcggaagcctttccgaataacaaacagagtagaatactgaaataaataatgtagcaaaaaacaagtaatgctttatttgttttccagtttactaattgtactgtgacaaaatagagtaatatcgccgtgatgccaaccgtaatgtagcccatatgactaactgtggccattacgtgctttaagtaaaaataaagccatccctggaaccaggaaaaatacatcgtcactgcagcaaatatagaaaggattggtaaaataagaattataaagtatcttttcatcctggcgtcctccttttcaaaggctacctcaaggataacatgtgaaaataaggactttcttaaaagggtttaaagattttctaagtttttctcttttacgaacacaaataaaataccgccaacgaggaaaagtacaattaaactagccacaccgtattgcgtttttccagtaatttgtgtgattacacccataagtgcgggccccatgattgctgaaaatttcccgaaaatattataaaatccgtaaaactcattcgaacgctttttaggaataatttttccgaagaatgatctacttaatgcttgaataccaccttgcgaagttccaactaacatcgctaatatccaaaaatcaagtgcagatttcatgaaaaccgcataaatacaaataataatataaacaaaaatcgcggtaaagataagcggttttgcact

SEQ ID NO: 3775 - DNA, 774 bp, Listeria monocytogenes 4b
  misc_feature (1)..(end): n can be any nucleotide: a,g,c or t/u
ttagtactgccggctacgcaccgcgctctgatccgctagtaccggccgcnnnnnnnnnnnnnnnnnnnnnnnnnnttcgctttgcctggtttccggcaccagaagcggtgccggaaagctggctggagtgcgatcttcctgaggccgatactgtcgtcgtcccctcaaactggcagatgcacggttacgatgcgcccatctacaccaacgtgacctatcccattacggtcaatccgtcgtttgttcccacggagaatccgacgggttgttactcgctcacatttaatgttgatgaaagctggctacaggaaggccagacgcgaattatttttgatggcgttaactcggcgtttcatctgtggtgcaacgggcgctgggtcggttacggccaggacagtcgtttgccgtctgaatttgacctgagcgcatttttacgcgccggagaaaaccgcctcgcggtgatggtgctgcgctggagtgacggcagttatctggaagatcaggatatgtggcggatgagcggcattttccgtgacgtctcgttgctgcataaaccgactacacaaatcagcgatttccatgttgccactcgcttttatgatgatttcagccgcgctgtactggaggctgaatttcacatgtgcggccgagttgcgtgactacctacgggtaacagtttctttatggcagggtgaaacgcaggtcgccagcggcaccgcgcctttcggcggtgaaattatcgatgagcgtggtggttatgccgatcgccgtgcc

SEQ ID NO: 3776 - DNA, 4584 bp, Listeria monocytogenes 4b
  misc_feature (1)..(end): n can be any nucleotide: a,g,c or t/u
gtcattcgagggcaattaattcgtccactagaaaccgtcggcgtttacgttcccggtggcacagcagcctatccttcatcggttttaatgaatgtgttgccagccaaaattgccggagtaaagcgaatcgtaatgattacccctcccggtgaaaacggtattaatccttacgttctagcctcagctcaactagctggtgtggacgaaatttaccaagttggcggtgcacacggaatcgccgctctagctcacggaacagaatctatccctaaagtagataaaatcgtcggtcctggaaatatctatgtcgccactgccaaacgtgaagtattcggcttagttgatattgacatgatagccggtccatccgaaatcgtcgtgctcgcagatgaaaacgccaatcctgcttttatcgcagccgacttactctcccaagcagagcacgatattttagcccgtgctatcttaatcacaactagtaaaaaaatcgccgaggaaacacaaaatgaaattgacaaacagctagaaaatctaccgcgaaaagcgattgctcagaaatctatcgaaacacgaggaaaaatcattatcgcagcaaccacacaagaaatgttcgatatcatgaacgaaatcgccccagaacacttagaagtacaacttgaaaatccgatgaactatctctatcaaattaaaaacgctggctccattttcttagggagttatgcatcggaacctcttggcgactattttgctggcccaaatcacgtcttacctacaagtggtaccgcaaaattcttctctcctcttggtgttgaagattttaccaaacgttccgcctttatttcttatacaaaagaagcactcgcaaaggaaaaagatgctatcgttttacttgctaaaaaagaaggtctagacgcccatgccaaagccattcaaattcgttttgaggaggaaaactaaatgagaacagcgactaaaacacgcattactgctgaaacttctattgagctttccattaacctagattcccaagcagaatcaattatttctactggagtcggatttttggatcacatgctcacccttttcgccaaacacagccgaataactttaaatgtaaaagcagatggtgatacatatatcgatgcgcatcacaccgtagaagacatcggcatcacactcgggctttgtttaaaagaagcacttgctgataaagcaagcattaatcgttacggctccgcttatgtaccgatggacgaatcacttggcttttgcgcactagatttaagtggtcgttcttatttagtttttgacgccgaattaacaaaccctaaactcggtgattttgacacagaactagtggaagaatttttccaagcagttgcctttaacacggaaatgaaccttcatctccgcgttctttatggcaaaaacacgcatcataaaatcgaagcactttttaaagcattcggtcgtgctcttcgtgaagcaatcacgattaacccagaaatcaaaggtgtaaattcaactaaaggggtcctgtaaatgattgttattattgactacgatacaggaaatacgaaaagcatcagtaaagcccttgattttatcgggttacaaaacaaaatttctagtgataaaacagaaatcgctcaagctgatggtgttattttgcccggagttggtgcttatccagaagccatgcaagaactcactcgacgcggattagataaaacattaaaagaaattgctaccgctggtaaaccaattcttggcgtttgtcttggtatgcaactattactcgaatcaagtaacgaacatagctatactaaagggctcggcctcattcccggtcatgtcgaaatgctaccagacgaatccgaatttgccgttccgcacatgggctggaatcaattacaaatcaaacgcaccaccccgcttacacaaaacatcgctggagaatatgtctattacgttcattcctactatgccaactgtccagaagcttacattatcgcaacaagtggatatgctatcgatatccctggcatgataaataacggacatatttacggagcacagttgcatcctgaaaaaagcggccaaatcggtcttgaaattttaaaaggttttaaggaggtcattcgttcatgcaaatcttcccagcaatagacttaaaaaatggacagtgcgtccgtctcttccaaggcgacttctctaaaaaaacagttgtcaatgaagacccaattgcccaagcaaaagcatttgctacagacggcgcaacctatttgcacatcgtcgacctagacggtgcattagaaggacgtcctatcaatctagaaattattcaaaggatgaaaaaagcagctaaaatccctgttcaagttggtggaggaattcgtagcatggcgcaagtggattattatcttgaatccggcatcgaccgcgtgattatcggttctgccgctctaacagatccagatttcctacgtgcggcagtccaaaaatacggagctaaaattgtagcaggtatcgatgccaaaaacggttttgtggcaacaagaggttggctcgatgtcagtcaggtaagctatttagatttggctaaacgaatggaaaaagtgggtgttgagacaatcatttacactgatattagccgtgatggcacgctaactggacctaatttagaacaaatggcaaatctcaaagaacacgttaaagttagtttaattgcttctggcggagtgagcagtcgtgcagatttggaagcactcgcccaactcggcttatatggagcaattgccggaaaagccctttataatcatgatatttccatgtcagatattgtagaggtggaacaaattgcttactaaaagaatcatcccatgtcttgatgtcacagcaggtcgagtcgtcaaaggtgttaattttgtttccttaacagatgtcggggaccctgtcgaaattgctaaagcttataatgaagctggtgccgatgagctcgtctttcttgatatcacggcaactgtcgaactccgtcaaaccatgatagatgttgtggaacgaactgctgagcaagtttttattccactcacagttggtgggggtatcagtagtgtttctgacatgaaagaacttcttcaagccggagccgacaagatttcgcttaattccgccgccatcaaacgaccagaactcatccaagaaggagcagcaaaattcggaaaccaatgtatcgttgtcgcaattgatgcaaaatggaatggtacaaattggagcgtcttcacgagaggcggtcgaaatgataccggacttgatgctattgaatgggctaaaaaagctgtacaacttggtgctggtgaaatcctactaacaagtatggacggcgatggaaccaaaaacggttacgatattccgctcacaaaagcaatttcagcagcagtttccgtcccagtcattgcttcaggcggttgcgggaatgccgcacatatggccgaggtttttgaaaaaacaaaggcaaccgccgctctcgctgcaagcattttccactacggtgaactaagcatcaaaaatgtcaaaacaaccttactcgaaaaaggagtgaatattcgtccatgacttctgtagatttttctaaaggtcttgtcccaactattatcctagacgatcaaaatggcgacgttttaatgctcgcttatatgaacgaagaaagttatcaaaaaacccttgaaactggctatacttggtttttttcgcgctccagaaacgaactttggaataaaggcgcgacaagcggacatactcaaaaagtaaaacaaatctggaccgattgtgataacgacacattacttatccgcgtaacccaaatcggtccagcctgccacaccggcaaaaaaagctgctttttcaatcttataaaggaggatttttaaatgttaaatgacctatatgaagaaattaaactgcgtaaaactcaaccaagagaaggctcctataccaactatttgttcgataaaggccttgataaaattctcaaaaaggttggtgaagaagcaaccgaagtcgttattgctgccaaaaataacgagcaagaattaatcgctgaagtatccgatttaacttatcacttgctcgttctcttagccgagcaaaatattccattatcaaaaatccaagcagagcttcaaaatcgtgaaggaaagctaagcaccactcgcgaccgtaaagaaatcaacgatttataaaaacatgacattttcgtaagcttagagatcattattgtaagaaaaagcgcatgatttttaaatacattttttatatccttgtttacgtggagagctttcattttcccaagagaaagcaaataatgttagagcaataattctagtatccgaattagtcttatcccttggctcgctttaatattatttctccctaatactcccttaaccgcatccccctggtgcggttatttttttatcacatcttcaattaatacgcattaaaacctaagctttccagcacacggtcggcccctcgaacatgctgcgacattgacaatcagggtnnnnnnaaaaggtaagggtc

SEQ ID NO: 3777 - DNA, 3381 bp, Listeria monocytogenes 4b
  misc_feature (1)..(end): n can be any nucleotide: a,g,c or t/u
ttgacaccctggagaccatgaagagtctatcacatggccatcatctcacgccccaccagtttcaccaatctgcgtctagccattcccttctacccccccatttttattcccccccagccaagcaaggtttcattccaccccagttttcttagtttattgttcattattccgttattagttacatgtagcaattttacagaagcacagtcggcagaagtagacgtcggttattccgttcaagctcatattcccaccaatccaatagataaaagacacacttattttgacctaaaaatgcagccgaaacaaaaacaaacagtaaacattgatgtaatgaatagttcaaatgaagaaattcaagtggaagcagcaatcaactacgcatccaccaatcgaactggtgtcattgattacaccaaaaatgatcttacgaaaaaagataaaagtttagaatatccacttccagaactagctaaaattccagacgaccaaaaactcctaacgataccagtagatggcaaaaagaccgtccaagtgatgattgaaatgcctgctgaatcgattgatggcgttgttttgggcgcagtagaatttaaaaagaaaaatactaacgagacgaaaaaaacaaaaggtgtctccttaaaaaatgaatattcctatattgtcggcatgcaactagctgaaaccgacaaacaagtcaaaccacatatgaatttactaagtatcaaaccggcactccttaactatcacacagcgatagttgccaaattacagaacgaccaaccagtcatactggaaaatctaagtattgatgcaaaagtctatcaacaaaattcggataaattactttaccaaacaaagaaagcgaatatgaaaatggcgccaaattccaattttgattttgggattgacttggaaaatcaacctttaaaagaaggtaaatacagattaaaaatgactgcaacgaatggcgtggaaacctggacttgggacgaagcgttcaccattggtaaagaaggacaaaacttaaataaagaagcagtaaacctagagaaaacgaacacatggctttacgttgcgattgttgcaggtgtggttcttatagcactaatcatcattttggttataagaaaacgaagacaaaaacaagaaaaataaagaaaggagctggcgaattggctttcaaaaaattaatacttgtattgaccattgcggctctttttcttggttttaaaatagtggtagcagcggaaaatgggagtagggacttagcatcaaatgaagcgatagtgactaattttacagaattaaaaacagctatttccgaagataatggaatagatacagtgtatttaggtgcagatgttgaattgtcgggtggaattatcatcccagcgacgaaaaagacatttactttatcaggaaaaaatccagcaacaggtgaaatacatactttgacagaaacaatggcatcagctggtgcccagagcagcgtgattacagttaataccaacacaggtgcaaaagagacaactttaagagatattaatgttgtggggaaaaattattatgggacgatttcggtttatggggctgcaaaaaacgtcgtacaaaactatgaaaatgttcactatcaaggtccgcaaatgatatataatttgaatggaacggcgaattttaaaggaaccaatgatataacaatagcgtccgttgtatctggttctgcggcaccaaatgaagtcgcggaaattaaaggcgtgagcgtttccggtaagttgaatatcaatcacgcaagttcgaatgcgaatagtgctttttggttcggtggtggaacggctgaggtaaacacttttacagtggaagaaaatgcagaggtgacgatactttctaatgggactgggatgttttatcgttcagggacaaaaccaattgatatagatgtgaaaaagaatgcgaagttagctattacttctaacaataatattttccgagacacgccgggcggagctgttaaaatcgcgtcaggtgcggatgtaactatgacaaaaactgctggcgggaatccacttctatgggtggcagatgatattaccgtaagtcctgatgcccgctttatcttgaataaaacaggcggaactggctatattatccagttttataatgcgacggcgaagttagatataaatgatcctcggagctttttaattacgacaaattcaaatacgccgatgttttactggccttatgcgaacacctttaatttaaatgcgcaaatggtgaattactgggatacggttggaaccattgatcgaacggatttggcagcgcaaagttttagtttaccaaatggggaaaatgtgacggggagtttgacgtacactgggacaacgacaaaaattctgtcaacgaatgcggggatgacgccgactaattttaatcaaaacaccgcgcgaatgattgcaatggggcgacttgaaggaacgataaatcctgtgacagacgtagataatgaaattacaggaacagcgacaccaaacgcttttataagtatttcatacacagaaaatggggaaaataaggttttagaaggacaggcaaatgaggcgggaacttatcgaattgctattccaaacggttttatcaagccttacattaaattgactacaaccattaaacaagaccaaaaaaggataacattagacgatataactgtagaagatgtgactccgccaagtggtgaggctgttactcaaattatccaacttggagatccctttccagatgtagccgaattagtaacaaatatttatgatcattccgataatacatctggagcgggagttacaactactttacaaagcgcgcccgatactaatgtatttggacccacagaagccattgttcgcttagaagataaggcacaaaattacgtggatatccgtgtacccgtttttattaaagatgatgaaacagagatacaagatggcaaagcattacgagcggcggacttttcggtaaatgtaaaagatattatcgagctcaatgatgccgaactggagcaattcattttaagcaaatcgggtgcaaaagctttcaatatcgaaactggtgaggacttaagcgcggagttgaaagtagctagcaccaatttgaaaaaagagacaggcacctatgcggcaacgatacaaattgacggattaacgaaagagattgcgattcaggttacgggtgagcttaaatttaatcatgtgccagaaacgatttccttcgaaacaatggagcttaatcaacaaaaaaatatcgcaaaacgaaacgctgactttgatttatctgtgcttgattcaagaggctcaggcggcnaatttagcgtaacagcaaccg

SEQ ID NO: 3778 - DNA, 4230 bp, Listeria monocytogenes 4b
  misc_feature (1)..(end): n can be any nucleotide: a,g,c or t/u
agcgaatacaatttgtgataagatggcaacaaagacaaacacaaaacaccgcgttctctatgttccggagcaattaggcgaagaagcctatcgttctttactgaaagaaccggcaattcaagaaggcttacgattagtacaatctgcaaatgctattattttaggcataggtgatgcgctcgcgatggcgaaacgcagacataccggcgaagatgtacttgaaaaaatcatccgtcgtaaagctgtaggtgaagcatttggttattattttgatgaacaaggcgaggttgtacataaggtccctacattcggtcttcaattcgaagacttagcgcaaatcccgcacattatcgctgttgcaggcggtacatcgaaagccaaagcaatcaaatcgtatatgaaaagtgctccaaaaaatacgattttaatcacggatgaaggagcagcaaaatcgcttttaaaagggagtaatacccttttgaaataaaaaaacactattttcaaggaggaaattgacttatgacagttaaagttggtattaatggttttggacgtatcggacgtctagcattccgtcgtattcaaaatgtggaaggaattgaagttgttgcaatcaatgacttaacagacgctaaaatgttagctcacctgttaaaatatgatacaactcaaggccgttttgacggtgaagtagaagtacatgatggtttcttcaacgtaaacggtaaagaagttaaagtattagctaaccgtaacccagaagaacttccatggggtgacctaggagtagacatcgttttagaatgtactggtttcttcacagcgcaagacaaagctgaattacacattaaagctggcgctaaaaaagttgttatctccgctccagcaactggcgacatgaaaacaatcgtttacaatgtaaaccatgaaacattagacggaactgaaacagttatctctggcgcaagctgtactactaactgtttagctcctatggctaaagttttagaagacaaatttggtgttgttgaaggtctaatgactacaattcacgcttacactggtgaccaaaatacattagatgctccacatccaaaaggtgacttccgtcgtgcacgtgctgctgccgaaaatattatccctaatacaactggtgctgctaaagctatcggtgaagtattaccaacacttaaaggtaaattagacggagctgctcaacgtgttccagttccaactggttcccttactgaattagtaacagttcttgacaaaaaagttactgttgatgaagtaaatgcagctatggaagcagcttctgatccagaaacattcggttacactagtgaccaagttgtttcttctgacatcaaaggtatgactttcggttcattatttgacgaaactcaaacaaaagttcttacagttggcgatcaacaattagttaaaactgtagcttggtacgataacgaaatgagctacactgctcaattagtacgtactttagaatactttgcaaaaatcgctaaataattagcagattaattttactgaagtgctagtcacatcagcaataacaagaataagcggagacactattgtttccgcttattttctgaaataacgggggcgaccccaatcctttaaaattaatggaggaactctaaatggctaaaaaagttgtaactgatttagatttaaaagacaaaaaagttttagttcgtgttgactttaacgtgccaatgaaagacggcaaaatcactaacgacaaccgtattgttgctgcacttccaacaattgagtacatcttagaacaaaacggtaaagcaattctattttctcaccttggaaaagtaaaaacagaagaagataaagaaggaaaatctcttcgtccagtagccgctcgtttaagcgaattacttggaaaagaagtgaaattcgttccaactactcgtggtccagaacttgagaaagcaattgatgagttaaaagacggcgaagtacttctttttgaaaatacacgttttgaagatattgatggtaaaaaagaaagcaaaaatgatccagaacttggaaaatactgggctagccttggcgacgttttcgtaaatgacgctttcggtactgctcaccgtgcgcacgcgtctaacgttggaatcgcttctaacttagaatcagcggccggatttttgatggaaaaagaaattaaattcatcggcggtgtagttgataatccagcacgtccactagtagcaatcctaggtggcgcaaaagtttctgacaaaatcggtgttatcgaaaacttacttacaaaagcagacaaagttcttgtcggcggcggaatgactttcactttcatggcagctcaaggtcaagaaattggtaaatctcttttagaagcagataaagttgaacttgctaaaggcttacttgaaaaagctggcaataaattagtattgccagttgatgcagttgtatctaaagaattcagtaacgatgctcctttccatacagtgagtgcagatagcattccagctgatgaaatgggactagatattggtcaagctacaattgacttatttacaaaagaacttcaaggcgctaaaacagttgtatggaatggtccaatgggcgtattcgaacttagcaactttgctaaaggtacaattggcgtttgtgaagctattgcaaacttaacggatgcaacaacaatcatcggtggtggggattccgcagcagcagctatggacttaggttttgctgacaaattcacacatatttccactggtggcggtgcatcattagaatatcttgaaggtaaagagcttcctggcgttgcttctattagcgacaaataagctgaaccaaaaataatttttaatatcgagaggatgtttatccaaatgcgtaaaccaattattgctggtaactggaaaatgaacaaaactgctgcaaaagcaggacaatttgcagaagacgtaaaaaataacgtgccatcaagcgatgctgttgaatcagtagttgctgcaccggcgctatttttacaagaattagttcgtcttactgaaggaactaatcttcgcgtagctgcacaaaactgttattttgaagacgaaggtgctttcactggcgaaattagcccgtttgcacttgctgatttaggtgtttcttatgttattatcggacactctgaacgtcgtgagtatttccacgaaacagacgaagatattaacaaaaaagcacatgcaatcttcaaacacggcatgacaccaatcatttgctgtggtgaaacattagatcaacgtgaagctggtcaaacagatacttgggtacgtggtcaaatccgtgcagctcttgctggattaacggaagaacaagtaatcaaatctgttattgcttatgaaccaatttgggcaatcggtactgggaaatcttccacaagtgctgatgcaaacgaaacttgtgcagttattcgtgcagaagttgcagacgctgtatctcaaaaagcagcagacgcagttcgtattcaatacggcggtagcgtaaaacctgaaaacattgctgattatcttgcagagtccgacattgacggcgctcttgtaggtggagcaagcttagaaccagcatcgttcttagcattattggaggcagtaaaataaaatgagtaaatcacctgtagcaattattatcctcgatggttttggtaaacgtgcagaaacagtaggtaatgctgtagctcaagcaaacaaaccaaatttcgaccgttattgggctaattttcctcacggggaacttaaagctgccggccttgatgttggtcttccagaaggtcaaatgggtaactctgaagttggccatacaaacatcggagctggacgtattgtctaccaaagcttaactcgtattgacaaagctattgaagaaggcgaattccaagagaataaagccctaaacaatgctttcactcatacaaaagaaaacaactcggacttacatcttttcggtttactatcagacggcggcgtgcatagtcacattaatcacctcgttgcacttttagaaactgcgaaagataaaggcgtgaaaaacgtttatatccatgcattccttgatggacgtgacttggcaccacaatcatcactagaatatttagccacacctttccagcacactgtcggccgtgtctagcgatccagcctcgggccagtntctgaagtcctgtcaaaaggncag

SEQ ID NO: 3779 - DNA, 5459 bp, Listeria monocytogenes 4b
  misc_feature (1)..(end): n can be any nucleotide: a,g,c or t/u
cgtaatcgttgagaaaacctatctcctgttcgtgtgatgtttcacaaaaaaggcgataaaaactctctttcgcacaaataaaaaaacttctaccactattggtaaaagaattcgatacgattattcgcaaatttcgcgaccgaaagttcttttcccaagaaaaagaacggaaaaaacagccggactcatttatcatgagttgcattttgatatagagtgcccgtataaattccaattcagtcaacgcaaacctagcgtcggcgggattgtagtgaatactgagcgcagtcttctatccctatgctaaaaacaagctattttttgggctcttatattaataacattgaccatcttatcacatgtaacataaaagaactagtgaaaatcgagcgtgtaacatatctgtaacaataaggcgctttcattctgaaaaaagaggaaaactagacttcaacgcctagttttccactgtgttttacacgataaaatcttctggtcgaccagtttcttcaaagtgactcttgattgctgctaaaattcgattagctgcgaatccgtcgccatatggatttaccgcgtgtgccattttatcatgattttctttattatccagcaaattcagtgcttctttaattagattctctttatttgttccaattagtttcaacgtcccggcttcgattccttctggacgctccgtcgtatcacgtaaaactaaaactggcacgcccatgcctggagcttcttcttgtacgccgcctgaatcggtaaaaacaagataagacttgcgcaagaaattatgaaaatcaattgcgtcgagtggctcgattaaatgaatgcgttcatgtccacctaagattttcgtcgctttttctctaacggctggattcaaatgcatcggataaacgagttcaacatcctcacgactttccacgatttctcgaaccgcctcaaacatcccttgcatcggttcgcctaaattttccctgcggtgagccgtcataagtattaaacgattgtcgccaagattttccaagattggatggtggtaatctttttgcacagttgttctaagggcatcaatcgccgtatttccagtcacaaaaatagtacccggatcttttccttccgcaagcagattttctttcgcttgtttagttggagaaaagtgcatatccgccattacaccagttaactggcgattcatttcttctggaaacggcgaatatttattccatgttctaagtccagcttcgacatgtccgagcattttttgttgataaaaggtagctagtcctgctgcaaaacttgttgttgtatcgccgtgaactagaacgatatccggattttcggctgcaataacttcattaattccattcattacacgcgaagttatttcagctaaagtttggccttttttcataatatctaagtcaatatctggtttaatatcaaaaatctctaagacttgatctagcatttcacggtgttgagctgtaatcactaccgttgactcaaatgtttctggttctttttctagtgccaaaacgagtggtgccatttttattgcttctggtcttgtcccaaagatactcattactttgattttagccaattgcgaacctccttataaaaaaactcctcagaaatagttcgacaaaaaatttcccagtctgccaaaaagcaacactgtttataattccttatctcactaaaccgaggagattgttaattatttagttccgaataatctatcgccagcatctcctaagcctggacggatataaccattttcgtctaacttctcgtctaaaccagctacgtagatttctacgtctggatgtgcgtcttgaagggctttaacgccttcaggagctgctactagacacatgaatttcatgttgcgagcgccgcgttttttcaagcaatcgatagccataattgcggatccgccagttgcaagcattggatctacaacgatgaaaagacgttcttctacgtcagaaggtagttttacaaaatattcgactggttctagtgtatcatggtcacgataaagacctacatgccctacttttgctgcaggaataagttttaaaataccatcttgcataccaagaccagctcttaaaataggaacaatccctaattttttaccagtaagtgttttcgcagttgttgtttgtagtggtgtttctacttggatgtcttcgagttccatatcacgtgtaatttcgtacgccattaatgtagcgacttcatctacaagttcgcggaatgcttttgttcccgtatttttatctcgaatgattgttaatttgtgttggactagtgggtgattaattacgtgtacatttgccatcgattagctcgctcctttgatattgaaaatttccttctcttattgtatcagaacaagacacaagtgcaaggattaatttgctatacatgaaaaaaaccggttttctctattttatagaaaaaaccggatcacttattttataaacttggataaagcggatattcatttgttaaagtagccacgcgtgcttttacatctgcgagaacttcttcattttctaaattatgcagtacttctgaaataagtacaccaactttttcaatcgcaacttcatcaaatccacgagtggtcactgcagcaacacctacacggataccacttgttacaaatgggctttccgtttcgaatggaatggtatttttatttacggtaataccaacttcatctaatactttctccgctgcttttcctgttaagccaagtggttttaaatcaattaataataaatgattatccgaaccacctgttaaaacagcaacatcattcgcttgaagtgtttctgctaattttttagagttacgaataatttgttcacagtacgccgtgaattcaggttgtaacgcttcaccaaacgccactgctttcgctgcgattacgtgcattaacggtccaccttggattcctgggaaaatcgatttatttaatttttgttcccattctgctttggctaaaatcattccgccgcgaggtccacgaagcgttttatgggtagttgtcgttgtaaaatcagcataaggaactggattttgatgcaagccagcagcaacaagaccagcaatatgcgccatatctaccattaagtatgcgccaacttcatcagcaatttcgcggaatttagcaaaatcaattttacgtggataagcacttgcgccagctacaatcatttttggtttatgttttaaagctgcttcacgaacaatatcgtaatcaatttctttcgtatcttcacgaacgccgtattcaacaaaattgtataaaacaccgctgaaatttactgggctaccatgtgttaaatgcccaccatgtgaaaggttcataccaagaacagtatcgcctggttcaagcactgtatgataaactgccatattcgcttgagcacctgagtgtggttggacattcgcatattcagcgccaaataattttttcgcgcggtcgcgtgctaaatcttccacaatatccacgaattcacatccgccgtaatagcgtttccctgggtaaccttctgcatatttattcgttaatacagatcccatagcttccattacttgctcactaacaaaattctcagatgcgattaattcgatattcgcgcgttgtctaccaagctctaacttaattgcatcaaaaacttccttatcttgcttttgtaaatagaccatctgtggaccccatccttttctgataaatttttcaagtgaactgttatgtattatctttaataattacttaaatcgggtagaaaagcaagcattttggaataaaaaaacgcaatttccgatagtgaagcgcttcacttataaaaaacgttcggaaattgcactttttagttcgtaataggtgatttcgtattgctcgattgatccaccgtaaggatctggaatatctgttttatcttcggaaattagttgaattttatcgctcgcttttggaaaaaggctttttagttccgcttgatgattttgagtcattacgtagatttggtctgcccaatctatatctgcttctgtgatttttttagcttggtgcgttgtaggcaaattcatctgcgcgagaatttgacgtgagttttcagagatggcgtccccgtccagagcacgtgtcccagctgaacaaacatctaaatccggacgcaagttctgcaagattttttcagctaaagggcttcggcacgtatttcctgtacaaacaaataataccttcattcgcgaatcctcctgttgccagcagctttttctaatcggttcataatcgctgctccaagttccgtttctggatacacttccgcaaaaatcacatctacatcagcatggtcgaaagcccgtaaacctttgtaaagacttgtagcaatttcgtccaatgcatttatactgccagttatttcgatggtaccgctcgtgtttagttgatttatcagttcttttgtcgccaaaataccgagttttttattcgcagcttccgctttatttatttcactttgccaaaattggatagatccttctattagataaactggcgctttcggggcatagtgcgtgtatttcatgccaggtgcttttggtttttccgtttctttcgtgttgtttgtcgctatatcaacagggccaattatttgttcaatctgttcttttgtaacaccgcctgggcgcagaataactgggatatctaaagaacaatcaataacggtggattctaaacctacaccagttgcgccgccatcgataattccggctatttttccatctaaatcttctattacatgactcgccgtcgtcggacttggttttcctgaacgattcgcgcttggagccgcaacaggaatattcgctgcatctatcaatgctagactaacagggtgttccggcatacggacgccaactgtggataaacccgcagaaacattagttgcccaactatcttttttcaatggaagaataaccgttagcggacccggccaaaatttttccatgagctggatggcttttactggataacttgcaacaaaaggatccatttgttcacgacgggcgatgtggacaattaatgggttatctgacggacggcctttcgcttcatatattttttgaacagcagcttggttagttgcgtctgcaccaagaccgtacactgtttcagaaaaaaaagccacgcattcaccgcttcggagtaatttggctgcttcctgaaagattacttggtttgattgttggttatttatgttccaatgaatggtttgcatgaattccggtcccctttacataacttctattatattttagggttttccgccttatttaaacagtattgttttttaaaaccctttccagcacagttcggcgctcaggcagctgtcagttacgtaagtgnnttnnaaaaggca

SEQ ID NO: 3780 - DNA, 3395 bp, Listeria monocytogenes 4b
  misc_feature (1)..(end): n can be any nucleotide: a,g,c or t/u
agcgggaaaagcgcggcttatttttgatgatgatattaagacgattttgccattattacaagaaaaagaaattacggatttaacgattactaatcaagagctggaagataaatttatgacgctatacgaagggggagaaatcaagtgaatatcctacacattgagtggaaaacgcgaataaagagtctggttgtttgggctgttgtggtgattgtgattttaggggtgtttatggctttcttccctagtatgcaaagtagtggaatgcaagatttagtgaatacgaagatgaatgcacttccgcaagatatgatgaaaattttgcatatggattcaatggcggatttaacgaatattgatgcctattttgcgtatgtttttcagtatatttttattgcagcttgtgtgtatgcagcattaattggtgcgcaggccttgataaaagaagaaacggatggaacaattgaatttttatatgcgcaaccaattacgcggtctagtcttgttttttggaaaatgattgggaatttattgtcatttgtggctttttgggtgattacatttgtagcttcagtggcgctagttcttttcttgaagccgagtggggttgacggaggaaacttagtaatggagcttgtacgagtgttttctagtgagttgctagtggctgctgtatttatgagtgctggttttatggtttcatcggtgcttcgttccgctaagcaagcttctccggttgcacttgcgcttgtgttcttaacgtatattttaggaattatggctgggttgaatgataaggtcgatttcttccaatatttttcaccaattaactatgcaattccgtctgagattatggataaagggattacaggaaccaatgcactgatttcttgtggggtaattgttgtgatggttgctatgacatttgttctttataagaaaaaggatttgaaagtataatggatgaaaaacgattaaaaattttagaagtagcaatgggagaatttacggaaaaaggatatcaggcggctagtacgaataaaatttgcgcaaaagctggtgtttccaaagggctgatttttcactattttggttctaaagaaaagctttatattgcggctgttagttatgcggttgattttgcgaccaaggaggttcgtttggaaggggaacattggggagactttgtcgaaatggcgatttggtcaacgaagatgaaactggattttaatcgcaaatatcctgctgtgtttggcttaattatgcaagcttatggaaatccgccagttgcattgaaagataaacttgagggcttttttgataaggcgattgagcgatcagaggcgcaaatgaatcaagttttaagtgaaatgaagttgaaaaaagatgtaaatatggatgcagcgcgtaaagtgatggcggctctttttaaacatattacggagattagtacagtttatttgcagagccatccaaatgcgacgatggaagattttgttccgcttgcgaaggattttacggaaatgatgcgaattgtcgaatttgggatatgcgaagaaaaaaaggatttgggcgagtgagcccaaatcctttttttaaccaataaagctttcgtgatgcgtgctaatcatcgcttcatctgcggcagttggttctaaatattttttcgcactattaatcgcgatgggcccttcatgaagtcccgctgcgataatgcgtatttttcgagggtaagtcgcactatctccacaagcgaaaatgccaggaaccgtcgttttcatctcgtcatccacgacaatgccaaaatctgcttgttcaaagccccattccgccatggttccaaggtctacttttaccccgtgattaatgaaaagtgcgtctgtttgaattgttttcgtggcttgggttttattgcagcaaacattgattttggttaactgattgtttgttccgattagttcattgatttcatggtggatatggatttcgacgcgagaattttgaagttctcggacactttcctcgtgtgctttaaaatcttcgccacggtaaataaggtgtacttgtttggcaatgggttcgagtgtctgagcccagtcgatagcggaatttccaccaccagaaaccactactactttatcgcggaattgctcgatatttttgacatcataatggattgcaaatggaaaatcttcagcatgtagagcttcaagtttattgacctcaaacgtgccactacctgtagcaatgacaatcgtttttgaaaaatggatcgaaccgttatgcgaagttaattgaaaagtgccatctgatagttttgtcacatcgacaactcgctcactgcaaacaatagtcggatgaaaggtttctgcttgttgttttaaatttgcgacaagattttcgccggtaatggcgggaataccaccgatatcgcgaatgattttttctggaaaaaagtagcgaactttcccgccaacagcaggttcagcatcgataatttttgttttcatggaacgaagcccactataaaatgcggagaataggccaatgggaccgccgccgataatggttacatcataaacctcatttggcactggaatcaagctcctttacaatttcgcatccgttgcaagtttcgtaggggaggcaaagagggacaccgctgcggggatcaattaaaatatctgctttgatattaaaaacatcctctaaagtttgttcagtcatgacattggttggtgttccttctgcgatgactttcccttctttaatagcgatcatatggtgagcgtaacgagatgcgtgatttaaatcatgaacaaccatcacaattgtgcggttctctgattgatttaattgtttcaataaattaagtacatctagttggtgcgtcatatctaaaaaggtcgtcggttcatcaagaaatagtacatctgtttcttgggcaagcgccatggcaatccatgcacgctgtcgttgtccacctgataaactatcaattggtcgatccgctaactccattaaattcgtcacgcgcaatgaccaaaaaataatttcgcgatcttttgcggtaatcgatttaaagctactttgatgtggggaacgtccataagaaattaattcaaacaccgttaaaccatcaggtgcagaaggattttgtggcaaaatagctagttgtttggcaacgtctctcgttggctgactatgaatcgtcttgccatctaaatacacagcgcctttgctaggtttcattaagcgggacatcgtttttaaaatagtcgatttccctgagccatttgcacctactaaagcggttattttattcgctggaatggctatatctaaaccatcaacaatgattcgtttgtcgtatgaaatttgtaagttatcggtat

SEQ ID NO: 3781 - DNA, 4927 bp, Listeria monocytogenes 4b
  misc_feature (1)..(end): n can be any nucleotide: a,g,c or t/u
ttaactttagactatcaagtaagcagtatcgcataacaggattagttccaacaagctatggtaagaaaatatatgcttttaaatatcaggatgtacgtgcaataggtacacttaaaggcaaaaaatagattaacaactaaaaaatgtaggaaattggttctttaattccaaagcatattaaggagtaatagtatagtgaaaagaataattttaacaagtacattaatcgtttggacaatagtatgcatttacatgagtatttctatggttagtaataatactggcattgcttttccaatttggcttcacatcattcttttaatctgcttcttagcgacaggtatagtaaatgtgaagaaaaaagaatatctttggagcactatgttatttgaaggcgtgttagtagttctattaagtttaattattgtattagtctaacggatgtaaatatatgaatagatggatgttccaaactaaataggagtattgttaactcaaacctctcaagtaagcagtgtcactactgcttactttttttggttgcttttatgtagatgccgtgcttacttctctcagatgcccaatcattcatttcacgtacgttttccgaaagctcatcagccggaataagccgcccatccactaaaatagacggattaatcaaacgcattttcttcttatgatgataagtaaagtccgcctcattttcttccaaatgggcactcgcgagcaattgaatcttctcccgagcatccgaattcgcattcaatttagctaacaattcagtatcagtcaaccgaagatccgcggttgtaatcgtctcctgctgaaacgcaatgcgcattgcttcagccaaaatctcataactataaacattcagcggatcataaaaataatcaatcacttccgaataatattgcgcaacaaaccattctgcaagagcgatatttgccaaataaagccgcccatcaaccattactaaagcctgcaaaaattcttccacctcagccaaactaattttcccatgtcgatacaaatcttgcaacgtataatcaatccggtcagcacaaagctccggggcttcttgctccaaaattttccacttcgaaatatcatcaaaaatcccttcaaaagaataaccatacttctctaaaatggcaggaatcgtcgaagtttttacaaagtcctcaaaaatctgctcatgataatcttcctcttcaaaatcaagcgcataatccaccacatgcgaaaaagcagtgtgcgatacgtcgtgcagtaagccagcaatttgctcctccaaagagccaccgaacttcctaataaaaagcatcacaccaatcgaatgatcaagccggctaaggtcccaaagcggatttactaaataactcgagccaccttgatgcacgtatgctagccgtgaaaccaatgggctctggattagttcagccaaaacaggttctatttcaaatgttccgtagagcgggtctgttattttcatcatattcacctctttttttaattatatattagcgaacaaacgttttccatgttttccctagcaattccaattttgctgagaaagcttataaaaaattactgaaatgaccgaagatgcgattgataaaatgaaaaacagttcggtagtgtaattattccagacgaaacctctgttgttgcacaaattttccgcgataaaatcgacctagttgccaacgcaatcggcgaatctatttcccaaatcaagcgggatgaagcgctgcaaaatggcgagcaaaagcgagagaataagtaaccttggccggtacagtgactgactcggttgaagtagtggaagaaatcccattggtgcatcatctggctaatgcgcccaggttgcgcatgaaagttgtggggaatttggtttaagggaagtaaatagtggaacattccaatcattttttataaagtaatcccacgtgtataaaaatacggtttatacacgtgggattatggttctatatgaaataggttatttattagaaggtttaaatggcttattttatttttcaatgtataaaattatgtatattgacacaatttgtgttattttgaacataaatttaagtaaatcaattcttaatgtattgattttcgcctaaaataggtcgttcatgacaagaatcggacatttcattacatttttggttatacattcattttctatgctatggttttagtaggaacaactatttgattaatgcatagaaaagagggagcataatgaaaaaaaggttaataggtattattacagcattattgttagtaagtgggattttgctatctccgcagatggctcaggcggaaacaaaagtggattatgacgcattgtatcaacagggagtatctgaagggattattaataaagcagatgtaagcttagaaacatggataaaagagaatgaaagtgagtataatcaagtctatcaagatggtttaaaagatggtgtctatgatgcatcattgtcgtatgaagaatggataaagttaaacaactatggacaacctcctgtagtagatgaaaattgggaagaagttccacagaagccaatgcttaaaggtgtgtataaaggttataatattaaaaaaggggacattctgattacaaaggtgacatcttcttccggattattgggacatgctgctattgcgaatgggaatgagtatatattagatattcctggggctggaaaaacgacaaggcaagtacctacaagtaaatggatgagtgattatgatccagaaggatgggtaaaagtttatcgcctgaaggatagttctgttgctaatgccgcagccaattgggcggacaaaaactattattccaccaaaggcacatccaaacaaaatattttcccaaaatacggtatgacaggaagtcgatatagtaagaaccctacttattgttctaaaattgtacttcaagcctattatttcggaacaggaaataagcctgttgtgcaagtatttccgtccttagttactgtgtatgatttaccaaactatttttcaaaagcatataagccacaacaagtgaaatactttaaataaatctcatgtattaggaagtgtcgctgaatgaaaaagtataaaaagtggtggataacgattggattagtgttaattatttgcattatcggatatatttattggtttgcaatccctaaacatacagcatatgaagcagtagatgattacttatcagcgcaaaagataaattcaacgcaagttaaaacgagggatattcaaaaagattggactagaggaggatactatgtcacgatagtgtttaaggatgaccctaatttagtgtatgaatacaactacaatagtaaaaggaatacgccttaccatattaatctacttgtttttaaagatggctcgagtcaagaagatgaccaagtgaagcatccaccactacaagagcaaaaggattaaagcagaaacccaagcattttaagtaagcagtgctactactgcttacttttttgtattacttttatataagctccacataaaaagtatcacgccgatcgaataatcaagccggctaaggtcccaaagtgaatttactaaataacttgagacaccttaatgcacgcgagctagccgggaagccaaaaagctttggattagttcaactaaaatctatcattttcattcaaggagataataaagcaccaacctctcccatgctttccctagcaattccaaccccacctgagatacaattaacccaaacaaacgaaacggggcggatgccatggcggaatcactcattactaaaaaagcgattgctggtgggctgatggagctttgtcagcataagcggtttgaaaagattagtattgcggatattacgaatatttgtggtcttaatcggcaaactttttactatcattttacagataaatacgatttgcttacttggacgtatgaaaatgattttttccattgtttggcggatgggattacgcttgaaaattgggataagcatgtactgaaaatgctggaatcgattaaagaaaatgctgatttctataaaaacacggtttcggcggatgcgagtatcctttctttttgcttttctaaattaacgaattcgctgtttatggatttatttgagaaaattgatacgaatggagccgtgaacgaggcggaccgggtattttatgcggaattcttttcttacggatgctcgggtgtactgattaaatggattacgcgcggttttaaagaggcaccggaaacgattgcgaaccagctatttcgacttgcgaaggatacggaatttttggcaaacagcatgtaccgcgaaaactagacaatatggctaatttgtctaaaaaccagacataagcgttcttttgcccagattaaaagcgaacgacaagcggtatactatctgtatcaagaaattggaggagatagtgatgaaaaataaaaaacgtacgctagtcgctctaactggggctgcaattggaacaggtattgccgcaaagaaaatttctgaacaaaaggccgctgaaaaagaacgggcagtggatgaagcaattaaggcgcgctattacggcgacaaacaagtgtatttcgtcggtggcgggattgctagtttggcgggggctgtttatttaattcgtgatgccaattttgatgggaaaaatattcatattattgaaggtatgcatattttaggcggaagtaatgatggagctggaagcgtggaacatggctttgtttgtcgcggtggtcggatgttgaatgaagaaacttatgaaaatttctgggatttatttagtagtattccgtcgcttgatatgccgaactttagtgttactgaagagattttgaattttgaccatttacatccaacccatgcgcaagcgagatt

SEQ ID NO: 3782 - DNA, 3812 bp, Listeria monocytogenes 4b
  misc_feature (1)..(end): n can be any nucleotide: a,g,c or t/u
ggcctacttgcacttcgaaaagcgcttggtcttttcgccaacattcgacctatccaagtcccaagctccatcacccacctttctcctttaaaaaaggaaattgttgagaacactgattttgtcgttgttcgtgaattgactggtggactttatttcggagaaccgaaatattgggataatgaggcagcagtggattcattaacttatacccgtgcagaaatcgagcgaattatcgagaaagctttcgaaatcgccgctactaggaataaaaaagttacttcagtagataaagcgaatgtgcttgcttctagtaaattatggcgaaaaatcgctgatgaagtcgcaagtcgtcatccagatatcacactagaacatctatacgtcgacgctgccgcaatgcttatgattcagcgaccaacgacctttgatgttatcgtgacagaaaacttatttggcgatattttaagtgatgaagcgtctgttattactggctcgcttggaatgctcccttctgctagccacgcggaaaacggaccatctttatacgaaccaattcacggatctgcgccagatatcgctaaccaaaatatcgcgaatccaatgtcgatgatatcctctgtatccatgatgcttcgtcaatctttctctctttttgaagaagcagatgcgattgatgcagctacagcaagaacgatgcaagctggatttttaactgctgaccttggaggcaatacttccacaactgattttacaaatgaagttctaaaacaaattgaaggaggagaataaaatggggaaaacactttttgataaactttggaatcgccatgtcatttatggcaaagaaggtgaaccgcaattattatacgttgaccttcatttgattcatgaagttacttctcctcaagcgtttgaaggacttagaatggaaaatcggccactgcgtagaccagataaaacgttcgcgacaatggatcataacgttccaactgaagatattttcaacattcaagaccttgttgctaaaaaacaaatcgaagcactgcaaaccaattgcgaggaatttggcgtgacgctagctgatatgggtagtgatcgccaaggaatcgtgcatatggttggaccagaaactgggctaacacaacctggaaaagtcattgtatgtggagattcgcatactgcaactcatggagcatttggagcaattggctttgggattggttctagtgaagtagagcatgtttttgcgactcaaaccatttggcaacaaaagccaaaatcaatgggcatagaaattaacggcaatcttccaaaaggtgtctatgcaaaagatattattttgcatctgattgccacgtatggcgtcgcttttggaactggctatgccgttgagtattacggcgaaactattcgcaatatgtcgatggaagaacggatgacgatttgtaatatggcaattgaaggtggcgcaaagatgggcatgatggcgccagatgaaactacttttgaatatgtgcgcggtcgtgaatacgctcccgctgatatggataaagcaattagtgactggaaaacgctccaaacagatccagatgccgaatatgaccttcatatcaaaatggatgcgagcattttggaaccgtatgtcacttggggaacgaatcccgaaatgggagtgccattttctaaagcatttccggaaattaaagatatgaactatgagcgtgcttatgaatatatggggctaaaacctggtcaaactgcagaagaaatcgagcttggctatgtgtttattggttcttgtacaaatgccagactttctgacttagaagaagctgctcgtatcgtcaaaggaaataaagtgaaaaataatattcgcgcactcgtggtccctggttctcgccaagtgcgtaatgcggcagaatctatcggactagataaaatttttatagaagctggctttgagtggcgtgaacctggttgttcgatgtgtctaggaatgaaccctgatcaagtaccagacggcgttcactgtgcttctacttcgaaccgaaattttgaaggtcgtcaaggtaaaggcgctcgtactcatcttgtttcaccagcaatggctgctgctgcggcaattaacgggcactttatcgatattcgaaaggaggcggttatcagtggaggaaattaaagtacacattggaaaaacagtagcgctaatgaatgacaatattgataccgaccaaatcattccaaaaagtttcttaaaacgcattgagcgaacaggctttggcgaatttctctttgatagttggcgctacctgccgaaccgtaaaccaaacccagacttcccgctcaatgctccagatcgtcaggaagcgactattttaattacgggagataactttggttgcgggtcctccagagaacatgctgcgtgggcactactcgactaccgtttccgtgtaattatcgctggcagttatagtgatatattttatatgaattgtacaaaaaacggcgtgctccctatcgttcttcctagagaggcgcgtgaaaaattagcgaaaattgcagccgatgaaaatgtgaccattgacttgccaaatcaacaagttatcagttcagttggtacctacccgtttgagattgatgctacttggaaaaataaatttattaatggactggatgatatcgccattacatttgaacatattgatgcgattaaagcctatgaacaaaaagtggattcaatataagaaaaggtagtgaggatgatggaattagttgatttattagtaacagaagaagatgtcgaaaaggcctatgaagtcttaaaggcggtcgtcaaacatacgccactagaatatgatttttatctttcggaaaaatatcattgcaatgtctatctgaaacgcgaagatttgcaaagagtgcgttcttttaaattacgtggtgctttttatgctatttctagattatcagcggaacaattggaaaaaggtgtggtatgtgcaagtgcgggaaaccatgcgcaaggagttgcatatacgtgcaaacgaatgaccgtcccagctacgatttttatgccaacaactaccccgcaacaaaaagtatcacaagtaaaatttttcggtggtagtaatgtcgaagtggttttagttggcgatacgtttgatgcttctgcaactgccgcgaaagaatttgctgcaacacatggccaaactttcatccctccgtttgatgatcctgatattatcgctggccaaggctctcttgctgtggagatggtgaaagatttaaataaagcacatgagcaagcagattatgtttttgcaggaatcggtggtggtggcttaattagcggtgttgcaacgtatctcaaagcaaagagcccgattacaaaaatcatcggggtagaacctgatggcgcgccttcaatgacagcagctttaaaacaaaatcaagtcgtaacactagataaaatcgataaatttgttgatggcgctgcggtaaaagaagttggtggcttaacgttccaacatgcgaaagtattagttgatgaagtgacaaccgtctctgagggagctgtttgttctacgattttggatatgtatacgaagcaagcaattgttgcagaacctgctggagcactatccgttgccgcacttgaaatttaccgtgaagagattaaagacaagaccgttgtctgtattgtaagtggcggaaacaacgacatcaaccggatgcaagaaattgaagagcgttccctcttacatgaaggattaaaacattattttatcgtcaatttctcgcagcgtcct

SEQ ID NO: 3783 - DNA, 4910 bp, Listeria monocytogenes 4b
  misc_feature (1)..(end): n can be any nucleotide: a,g,c or t/u
gccacgctcgtcttcaccttatcaatctcattcgttaaatcaccatttaatttagccgcttcttctttacgatcaaattctgctccaagttttttaatttctgtttgcatcgaggcaatactcgtaaagtctagaaagtccgcttttaaatcggccccttcaaacccagcctttaagtccgcttctagcgttttcgttgaaaggaccatgtctggcttcaacatccgaataatttccaaatcaggccccataggcgacccagtttcctttacatctgcataacgctccggaagttttttagaactagtcggaattccaacgagtggcaaatcaagtttatccataatttccgtaatcgctaccgtagtcgccacaatttttggctccttctccgatttttgttcaggcttttgagccgcctcttcctttccacagccaactaaaaaaagtaataacatcaaagatatgacagccattttcctcatcactaattcccccatttataaaataaaatcggtaaagcgagttaagcaaaggaaacccccgacctaactcgcttttactaattttattaactcaatcttttacgttttaatcgataagctaaataaaggaaggaagctccaaataacgtaatgtaccatgccatacttgatgaatcattcgttttcgcatttttttctgtgctacttgccgttttttgaacagaatttgtgtcatcaaaatcgggttttgccaattttggcccagcattattgttattcgctacattgccagtatttaaaatatcctttttcaccggttcttttaacgttacatcttccccggtaatatctttaattgttgctgcattaagttttacttgaaccgtatactcatggtcgtaagagaagcctggcatatcttcaattaatacatgcgtttttacatctgtattagccgtgccatcttttacaggatacttgacggttctcgtatttttgttgatatctccggaaacaacttccatatctttccaaacaccatttgctttatactggaaagttttaatccagctactgtttgttaaagttaaataaacataaggttggttattttctactttgattaaagccggtttcatcacatagctttccatcatagaagtttccgttgttccgtctttaaatacatcaaaatcaatggagtacgtatggttattcagtaaatttttaggatcaactactgccggtttacttggtgttgttggcggcgtagtcactggtggattcgttgtacctggatcaggttttgttactggtggttttgtttcgcctggatctactacaggaggcgtctcatcactaccagggtacgaactagccgcagttgctttcgttgtatcaaacacataacggaagtctgcttgtcctttgtatacagaaccattgaacggcgcttcataattaacatgagccgcaagtggttgatttaaatcctccacttcaaattccacaatacgcgtgtttgcatctttatcttcagaaactactttaacatcttgcaaagctccagcaagatttgtttttaaagctgttactgttttattatcatttactgtcattgcaacagttttcttcccatttttcactttcagccaagcaggattattaaaataattttgcatgcttgagttgctatcatcatttgcttttttcgctacaaaaggaatcgtgtaaattccgtccgaaagagtcacaggtgttgtaatagccggttctgaaataactttgaaagtacttggatcaatggttaaatccacttgataccagtgatcataactaattgcatctactttaatatgcatataagagaaaataacatcatctaaagaactaagcttgaatttctctacacgcgtatctttcgctgcgtctgtgctcactgtttgaacatcttcataacgatcttgataaacatccgcttgtgctggcttttctggacgagccccattttttgaaaccgccattgtttgccaccaagtactatttgtaattgttaagtacatataaggttgaccattttctactttaatcgttgctgtatggtcaatatatttatctgcctctgaagattctttcgttgttttccctgtattatctttataaaaattcacttgaacttggtattccccgccatctttcagacgagaatcagccgcattagcaaaaccaggtatcaattgaaaaataagtgtcaaagccaagaaagctactaaaccttttttccataatttcttcatcataatccccctttatttaaaaatcgcacgtcttttaagtaaaactaaccctgcccctgctgcaacaaaaataattccatataaaaacatttggctagaatcactagacttcggatttgctactttattacttgagtcactttttgttgctggggttgctgtatcgttattatcagaagactttaccgcgccagctaatgctttagcagaaccttcatcaaaacgtaacttgatttgatactcatgatgataatttaaatcgtcatcatcaatatctactttgatttttgcattaacaggactacttaaagtcgacacaggaaacgacacttttcgagtatcattcgctgtatttttcgaagtcacgctaaccgcactaccttcgacccataaaccagtaatccacttactatggttcacttgcaaactaacagtagatttacctccatttacagttaccgttgcaggcttatcaaaatagtcattcgccatagatacggaatcactatccccttgtagtaccgtataatcaaccgaataggtgccatccttaagagcagcttgtgccgttaatcccgtagaaagaaacgaaaaactgaataaggcaataaaagcagccaaaactaaaactttcttcatacttaaatctcccttctttaataaaaactactatttataaaaaacccccactaataaaagtggagtaaaagtttatgtaaaaggatacgttaattatcattttaattgataatgattatcattgtcaacaacagattgctttttcacaaattaaaaacgcaaaaaaaccatgaatagcaacaaccatccatggttaataattatttccttttactcttctatttgagaaaagcgatcatatagtaattccccttttaaagttaacgtgtatcttttttctgcaatattattatttcttgttaaaaagccattctcttccaaccaataaagcgttagtagtacttcattttttgtatagtcccgcagatttccaaaatcaatcacttcaagtgacatatcattaatcttcgtatctacacttcccgcaaaaagaagtacttctcgtagtaatttttcatcttcaaattccatctttaatcctcctttaattctgagttagtatcgtaataacgtaaaaagccgtagcaaaatgccacggcttcttacagcgcaatcaaaaggagaaattcacacaatcaaataaagggggtatttgtttgtgatttatttcacggttataatataccatataaacgcttataattcaatagttcacatacctatttttatttgtctattctatgaatattggcatcactcaaacatacgaaaaaaaagactcgcagccattatcgctacgatgtctttttttagcaaatttcacaatatattatttaactaatttttctagttcatctaatctttgttcaaatacttttagtgcatcatccaccggattaggagttgccatatcaactcctgcttttttcaacacatcgataggataatccgaacttcccgctttcaagaaatcaatataggcagtcaccgcttcttggccttctgttaaaatcttcgcactcaatgcagatgctgcagaaaaaccagtcgcatattggaacacataataattcatataaaaatgcggaatacgagaccattcataaccgatttcagcatcataaaccatcgcttctccgtaatatttcttgttaatatcaaaatatgtttcggtcaagtaatccgcagtcagcgccactccttcttgatccgcttgatgaatagcatgttcaaattcagcaaattgggtttgacggaatacagtacccttgaatccatccaaatagtgattcaacaagtaagcacgaacttttggatcatcatatttcttaagaagataatcagttagtaaattttcatttgttgtcgaagcaacctccgctaagaaaatcgaataatcaccataaacaaatggttggttttttcttgtataataactatgcacactatgccctaattcatgcgcaagtgtgtaaacattgttaatattatcctgccaattgagtaaaatataaggactcgtactatacgaaccagaagaataggctccactacgttttcctttattttccatcacatcaatccaacgactatcaaatgcttcttttaaaattgcttgatattcatcaccaagcggtttaagcgcttcaagcacaagttctttcgcttcttcataagtaaactccaaattaacatcatcagaaagtggcgtataaagatcatacatatgcaattcctctaagccaagtaattctttacgtaacttcacataacgatgaagcaaatctgcattcgcatttactgattttaacaaggaatcatatactgtttcaggaatatggttcccagaaagagccgcttcacgagctgacgtgtagccacgagtggaagcataaaaattagacttcttcacttgtccattcaaagtagaggctaaggtgttttttaggccttcataaacagaatacacaccaagaaacgattcacgacgaactcgcggatctttccagcacacgtcggccgctcaagcaanagacaggttacctacagt

SEQ ID NO: 3784 - DNA, 5839 bp, Listeria monocytogenes 4b
  misc_feature (1)..(end): n can be any nucleotide: a,g,c or t/u
gctcggaaagttaaatgggttttatctgccccaattcttttcgttccttttaaatgcatattttctaacaagaaaattggtttagggttatccattccaaaaggagctaatttttcaagttgagcaataaatgctacggaaacatccgcaatatttattttctcttctattttcaaggctgggcggaaatcttcttcagaaagaaaactcgcttcttcttgtaatttagcttctaattctgttagattttcagcgggcaatgtaagacccgcagccattggatgcccaccaaatgcagtcattaaatcacgatgtttatcaagcgcttgatacaaatgaaatgcatcgacgcttcgaccagatcctttggcaattccagtaactggatcaattcctagtacaatcgccggacgagaatatgttccaactaatttagaagcaactatccctaaaatccctgtattccaaccctctccgtaaacaacgagcacatttcctaatgtttcttttgcctcaattgcctccatcgcgagcttcgttgtatcaacaactatttgtttacgttctttattcgcatcatcaatttcttctgctaagaaaagtgcttcttctggatcctctgttaaaagtaaatccaccgctggatctgctgggcctaaacgaccaacagcattcagtcgtggagctaaaccaaagccaatagtttcttccgtagcctcttctaacttcaaactagcttttttagctaacactgaaagtccaaggttcgcggattcgcgcaattggcgcaatccaagttggacaagtaagcgattttcatctgttaaagaaactaaatctgccaccgttccaactgcaactaaatcaagcaattctttcggttcttctccaagtaatgcatgcgataacttataagcaacacccacacccgctaattcatcaaacggataagctgacttaggatgcttcggatgaattactgcaacagcttccggcataacttcccgtggttcatgatgatccgtcacaataacatctaaaccaatctctttggcatgcgtcattacttcaagcgccgcaataccattatcaaccgtaataattaaatccgttccttggtttttagccatatcaaaagcagcgatatttggaccataaccttccgtaaaacgattaggaatataaaattcagcatttgctcctaaatgccgcagtgttttcattaaaacggcaatactagtaactccatctgcatcataatctccgtaaactaaaatctgctcatttagttctatcgctcgcttaattctagcaaccgcaagatccatttcagcaaataaaaatgggtcatagctttcatatttttctgggtggaaaaatttatcgaattgtccttgcgttgtaatttttcttttccaaagtagttttgcaagtggaagcgaaatttttagctgttctgctaattggcttgctttgtcttccgccgcttcctcgatattccataagtattttgaatgaatcacattaccccacctctcaaccttcctattatatcgaaaatcactagaaaaaccaagaggaatcttctaacaaaaaacgccaacatattttgtcagcgtcccattttttatttagttgtgtctaccacattttctgtatcacgtgtttctactttagatgaatgagttttcattgctttagcagctgctagttggcgttctaattctgctttttcggatgttaattgttttacttgtttcttcattccacgcgatttcgcgatatttaagaaaaagataattaaacaaccacaaagaacagagcctaaaataattaaaattaatggccactccgcttgcgcaaataaaaagtttacttctactggatctacattaataactgcaaaaatagcaataatgagtgctaaaataatccccgcaattacttgccactgtactttattttctttcatgttttttctcctccttgcacaattatcttattatttacccgtttctaggctattaaaaacgaccgaatctctttttatgaaattcggccgttcgtttttatacgacaggttgcccattattacgtggttttttctttttaactgtgctaattgggcctttttttcgtagttgtcgtgctttgaatacgtaccacaattgcattgccataaagatggaggagaatacactcgaaacaagtccaacaagtaaggcgatggagaagttcagaatagactcactaccaaatagtacaagtgccagtacggtgaaaataaccgttaaaatggtattaattgaacgagtgaatgtttggcgtaatgctttattaaccgcattcgcaatttcttctttcgttttgaaacgttgcatcttcatactaatatcccgtatccggtcggcggtgactatcgtgtcattaatggaataaccgataaccgtcagcaccgcggcaatgaaggttaagtcaacctccagccttgttacactgaagaatatgaagatgataaatgcgtcgaatagtaaggacagaatcgccgcaatacccatataaaattcaaaccggactgcaatataaagtacaatcagcacagacgccacaccgagtgcccagaagccatttttggcaagttctttaccgacagttggtgaaacggtactaatgcttggttcgtgcttatacttgtcctcaaaatagtttttaaatttagctacatcattttgtgataatgtccctttataagaaacaacggctgttttagaccctgatccttggaaaacaatatcatccgatggcatatcaatcgcatctaaatctttcttaatttgcgtttctgtcagcgtttgattagctgttacttccgctcgtgtcccactggcaaagtcaatacctagatttagcctaaatatggagagaataacaataccgacaataacaattgcagcaaaaatagataagaacagacgatgatgttttacaaaatcaaagcgatcaaagtgtgtttttaagctaaagctattaattccctcatgtaaattatgaatatcttttcgtttaactgcaaagaatcctggtttattgttaagccaattacttttcactaataagcctaataagaatcttgatccccaaacggctgtcaagaagctgactaaaatactaatgattagaaccgtagcaaaacctttgatggagcttgttccaaagtagaagagaaccgcagctacgataagtgtcgtcaagttaccatctaaaatcgcacggaatgcttctttaccgccgacctcaaaagccgctttcgtcgacctaccgactttgatttcttcttttatccgctcgtaggttattacgttcgcgtcaacagccatacctatccccagaatcaaacctgcaatccctggtaaagtaagtgttgcgttaagcagactcagtattaatagtactaaataagtgtatgcaactaaagtgatacaagcaataacgcctggtaaacggtaaactgccatcatgaaaataaagatagcaatgaccccaataataccagctaaaattgtttcttgtaacgcatcttgcccaaattgagcaccaacagatgtcgagtaaacttctttcattttaacagggagtgcaccagagtttagcaaatcagctaaatcttttgcttcttccgttgtgaaacttccggaaatttctactttatctgtatcaagcacgctactaacgtttggtgctgataagtaagctgggtctttcttctcgcgttctgtttggtatttttgaccttctttccaatctaaccaaataactaattgattgtcaggcgcttccgctagtattggttttgctacactaccaaatatatctgcactgtctagttccagcgtaacgattgggtatgtgcttgaatcgaaagcttgcttggcaccgcccgcaactaaattactaccattcatcatcatcttgtcatttgcatctctaaatgataataagtgctgcggtagatagcattacacgagcttcttactgatcagctaccccagcaagttgaacacgaatacggttatccccttcgatttgaatacttggttcagctacacctaatgaattgatacgcttgtcgagtgaagttaccgtatctgtcaatgtttgtttggatacagttcctttgccatcagctggtgaaacttcatatagaacttcgaatcccccttgaagatccaagcctaggttgatgttttgcataaccatttttgcggtaccaaatacagcaccaaagataattgcaactactagaaagaaaataactatcttactcttttttaccatttctgtttcgttcctccctcatctaaaccataacaaatcccagtctaacaacaaatacttctattttatgtatgaaacccaagcatttgctaacaggctgttaatcttccacatttggttgaagcatactatctgcttgagaaacatggttattagattcttgttcagctgttgtcataataaattgcattaattgtccaatattcatttgcataacatcatttatacgttcatgcaaagcaggggttggttcattcttccacttttcttctgttaaaaatgcccaaatgtggcttgccttgatttctcggtaacctaaaatatgaaaatcttccacttttattgaaatcgctggcgctaaatcttcataccattccgaaaatgtatccatatcaagtcgtcccctttcttaaacaataagcatattcccattttatctaaaaaaagcttaaatgggaagtataagctctatttttatggttaaaaaatgccatttcaccgtttaaagggaaatggcatttttatttcaagtattatttgttgtcttctacaacttcagtgtcatcagaagttgtttctgctacaactggattagaaactgcattacctttttcaagtacagttctgattgcattacggtcaaaagttaatttgctgtttccgcatttcaaaatgactgtgccatcttcaattgcttcaacaataccgtgaagtccaccaatagtaataattttatcaccttttgctaaactactttgcatattttgtacttctttttgacgtttttgttgaggtctgattaataagaagtaaaacaaaacgatcatcaagataattggtataaatgttacaataccgcccatattttccaactcctttcgatactttatatatatttagaaattttttgcatcaggacgattgaatccatattgctcaaaaaattcttccctaaaatcagcaagacgatcttccataatagcgccacgaacttgcttcattaagtttaacagaaaatgaagattatgataagttgtaagtcgaattccaaatgtttcctcacaacgaatcaagtgtcgaatgtatgcacgtgagtaatttttacaagtataacagtcacaattttcatcaattggacggaaatcatgggtaaacttagcatttttaataactaagcgaccactagatgtcatacaagtaccatttcgtgcaatacgtgtgggaagaacacaatcaaacatgtccactcctcgaattacgccatcaatcaatgagtcaggcgaacctactcccattagataacgtggtttattagctggtagtagtggtgtcgtgtgttccaaaacgcgattcatcacgtcttttggttcaccaacagacaatccaccaattgagtatccagggaaatctagagataccagatctttcgcactttgcgcacgtaaatcttcgtaagctccaccttggacgataccgaacaaaccttggtcttctggtctaacgt

SEQ ID NO: 3785 - DNA, 5917 bp, Listeria monocytogenes 4b
  misc_feature (1)..(end): n can be any nucleotide: a,g,c or t/u
ggtcggtccggcgattaatttccagcgggtagggataaggcgtgtgttgagcaaagataaagtcgtccacctctaagctaagcgaccagagacgcaccccgaggggatctcgccgccaccgcgatcatcgtgggcggtggcatcggtcgcatctttttgcaccagttctcccccatatcttctggtggattttcatctgggcgcgcatccattattctggctggtcatggatatacatctgtctcatttgcacttgcatctatcgcttgaaaagaagcaaccccgataataactatgctaaataccaagaatagtctaaatagatttttcatcctatctcctccaatttataaaggacgaggaaattccccgcccttctatattattctgcggatggcataactcttacattatcaatgtgaatgctcgttcctcctggggaatccatttggaaactagtattgatattgcctgttgttactttgacatccttcagtgctacataaggccgagcgtcatctgcaactaagtcaattgttttaccatcgctgctatcataattattagccgtcatttgtgcttctgctgcatcatcgttgcttactttcacccatgcttcaacgtcgtaattcgcattattaactggacctgcgatttgttgagcgagtgtttgtttgtaagcgccaggtaaatagaaataagcgctctgtttaccaaatgctggtgattctggaggattgacacctgagccactatcaacgccgtatgctttgtcttgcccatcaggatgagactctacccaattggtcgttgccgctgcatcccgctcaaatccgccgttatcgagtagatttacttccgactgtactggtgaattgattggctcagccgaaacaagaattctatcgatatttacattaccagtagtttcgccgtctcttaggaaggtaattttattggttcctgcttttaagttcacagctttttctgtatctgaccaaatattccagttttcaccttcggaagggaaagttacgcgagagttgtagtcaccattcgtatataaatcgagtgtttgtggcatgccagttccatttgctgttcgtgtgtttagtacgtactcgccgtcagctggtacatccacttcaaacttgatttcatctcctgctgctccaaatccaccaacaaaaccttctccactatagaaccagtgatcgttcgccacttttaaagtgccggcaaggtccgcttcttctgcttcgacttttgctacagttggtgtgaaaccaatatttactttgtctagtgatacttgatcagctttatcgcctgtgtccgttaccactttataagaaatactatttttccctgctgaaagtggtaatgcttcggactgaactgaccaatcggtgtttggttttagcgtggtttgttttacataatcaccattgacaaaaatacttaatgattggttatctgcggaagcatttttgtaagttaggtccacattataatcaccagagtcttttacatttgcatagatagtagttccggcgccgtctttatcgtagccatccacatacgttttttcagcaaccggtttatcagcaactgtatcagcaaaattggatcctgtttccatttcgtatgttcctgtttgtacgacacttgcagaacctgaagttgtaatgacagtatctgcatcagcttgagctggtacttttacgtatgttactgctccgtatacatcgctacctacagcatatccgctaccatcagcagtttctaaagcggataaatcgtcataaactttgctatctgcgccatttacttggacgctttcagccgcatttccgtgtagttttacaatgtaattctctgtgtctgctttataacttccttctttcgcaccaatcgtgaaagtactagtatcagcagtttttgaagtagtcattttttgttttaaataggtatctttttcataatcaaaagattttccgtcgtcatcgtaatgtgtaaaggatgtctctttatctgatgcaaaagtgtctaaataaattgttttgactgcggattcgccaacatagttttgtggttgttgcattggcataatggcaccttgtttaacaaacatcggcacatctgtccagtcgtcatcattcacttcataactgattgtttgatttccttcgtatacgtcgccacggttgtagtcaatccatgttcctgctggtaaataaatatcacgagaacccgctccttcttctaaaacaggtgccacaagtaatccatcaccaaacatccactcatctgttaaattaaccacattttcatcagtaggattatcaaacgtaagtggttgaactagaccaacaccagagtcatatgcttgacgttcataagcatacatataaggaatcattgagtagcgccaagtcatgctacttttagcaacttcttccgccgtgccaccatagaaccaaggttgacgttgttgattttgattcccatgcgtacggaaaactggaactagagaactaaattccatccaacgactataaagttctgggtccgggtttaacacttggcccgaattggcattgaaaccacctgtatccatgccccattttgtctgtcctaaattaattgtcgaaagcattgtactaggttgttcttgcatcccatttgcccagtcaataacttcgccttttttccactgaacgccgatatcgccggaccaagtagaagtagaataacgctgtgcgcctgggtagaaggttcttcctgtttgccaaacacgttcatttgtatagtcgcgttggccttcatacatagcttctgatgtaaatccagttgtgaaattaccaaaccaataatcggctccattagaagatactttgtctgtttcatcattccaccaaccgacaattcctttatctagggcatcctcagaatgtgaccaccaccaattacgttcatcttcgttgtatgggtcaatacttcttaccgttacagggaatgcatagtcttcatacgcagattgccctggataccagtaaccatttgcttctgcatctttcccttgttgcgtggctgttccatcttctaaattagttacgacacgcggttttgtaatcccaatcatttttacaccaagtgcatccatatcggattttaacgttgtgtcttttgctgatgggaagttttctgtattccaagcaaactcgccataatcgccaccatacgtaggatctccgtagaatttccaatcataatcaaacgcgaaggaatcaatcggaatccctttcgcacgatacgtattaatgttttctctaaattctgtttcatttgttccccactcaaagttagagaatccaagcgaccattttggcatcattggagtatgccctgttacatcagcataagaagacataatttcttcgggctcaccagacattaaatacatctctacattttctttcacgtagcgacggccttcaaccactgtatcgccgtaataaaactctaatttttcttcatctgaaacggaatacgggtacccgccatcactatctacaagtaagccatatcctgctgtagaccacatgaacggaccgcctgcattaccttgctgacccgcttgtgcagtcttattactatcggcagcagtattatctcgttccatgcccaggtctccgtcactaaaactaattccataggcaccataaacatggtcagaagcgccgcgcttaaatctaacaccgccatcaaaaatcccgccgtccgctgattcagacaataacgttttcccatttttatctttaaaagtcattcgtgctggctctttagcaatttctagcgtacattcatctgttgaaattatcatcggatctgattccaagtcaatggtcgcaccaatcgctgtgaaagttgcattcggatcaatcataggtgtagatggactgttttcgatattgcgtggtcgcaaattcaccttaagcaaattattcgctagcggggaaatttccaagtaatcatcttctgcttcatccccgttatcaattttaagcgtgatgacattatcagtcaccgttgcttcaaggacatttccaagcccttcctccgcacttaatttcgcatattcttctttgctaagttgcttcgcggctcctgtattcgcttcttttttcacttctttttctttcgtttcttccgctttcacttccacttgtaacggctgagttatccctaaattcagccaaactagtggtacaacagccatactgacacaaacttgtttcataccttttttcatcatctcgcccctttttattctgtaatagttactggaaaatcataccaacccgtatattctccagagttataacctaatgaaatttctagcaaatgctctcccggttgtaagccagctgtttcaatcttgtacatgtatgaaccatcataggtcggataaggtggttcataaagcgttctaccattgtccttaataataattaaatcgtgtctgcttggtgcgataaaatctaatgcttggtaaataaaaggaacaaaaacttccaagttctctccttgtttaatcgttgtgtgaggataagttgctgtctggttagcaaatgaatgtgtacttaattgttctgatagaaagatatcttccggaatagaaattaaatgattctcattaagaagtagtgaatctaagttaggcatattcatccaaatatcttccgctacataaccagaaagtccagcatcctccatattaatacttactagtccttccattccaacaaattttggaatattaaagccaaaattattttgactcaaatcaacattggttaagttaggatagtttgcatctggaaaaagagtaatattagccccatttgcttcaatattttctaaagcaggaagcgcatcagataaatcaggcagttctccaatattattactccaaatcgctaattcaatcgcgtttgtaaatacttcattgtttagtacgcttaagtcttcccccgttaaacccaatgagggcaaaggaataagagtcattgtatccaaatctgcttgcgtaatcgtgtcatttacagaatctttatctagttctcccgcaatcgcctccgctatcgcttccacaggaaaagcctcaataataggcgctggtaagggaactgtatccgcttgtgcttttatagttggtgcaaataatatgcaacaaaaagctataaatgctagcccaattatttttttcattcagttcaatcctttcaacatagccaccctctctatccataaaagggtggcttattggatttatttcttaaatactacatggtcaaaatttatttcctctgtatcatctgcttcaaaatcaaatacaacttggttattaccagcttgcaaggttactggaacttctatcgtgctccaagtatcccaatcagccgttttcggtaaagtaatttgttgttttttaccgttgatatatacggttctagttgcatcttctacgccagcactatagcgaacttccattgtataatcagaagcaccatctactgcgtctacatcaaactctaccgcttctttttctgcatcaaagccggctacaaaaccagtaccagtatatcccgcgtgatcacttgcagtacttacatttgtcagatgagcaaattccgcttcgtatggtgcatgatttacaccgtttaatacgattgcttgtttggcatcttttgccactgcttttacatatgttaagttttgtactgtatcatagtagtaacctgtcgttgcttcgttaaatgcatctagcgtatccgctttagctacatctgccccgtcaatcgttacacttgtaggttctgtactgaaaacttgcatcgttgnttcatccgcc

SEQ ID NO: 3786 - DNA, 3778 bp, Listeria monocytogenes 4b
  misc_feature (1)..(end): n can be any nucleotide: a,g,c or t/u
ttatatcagctagcaagctatcctggccggatttttactcgagaagaattaattgagcggatttggcaacgtgattatgatggtagtgaccgtacagtggatgtacatattaaacgattgcgggaccattttgatgaagaaaaggatggtattcgaattgttacagtgcgcggcgttggttataaattggaggagacaacatgaaatcgttatatagtcgaatagttgtcacgatgcttgtcgtcattatttccagtagtttgctcggctttttctttgcaaacatttattaccaaataaaattaaaaccttttaacgacgaaaaaactgccaaaatagcggaggaagtccaacaattttatgagtcaaatgctacgatttctttaaacgagtacttggaaaatgtgggcgaactgggatacgaattatatttgacagatggcgcggaaaaatccacttattatggtggcgcttttcggaaaaaagatttaccggataagacaatcaagcaagtactggacggagagacatatcatggaattgattcgtttgatacaggcattttcatcacaggcttttttgataatgatgtgcgaaataccattggtgtcccggtccaagctgatggtaaacaactagcgctattcatacgccaagacccggaacaacaatttggggaacttcgaatatttttcgcgatgatacttattttcacatccatcatcagtattctgttggttcttattagtggcagatatattgtcaaacctgtcgtgaagttgacgaatgcgacgaaaaaaatacgtaaaggcaattatgatgtagcctttgaagttcggcgtaaggatgaaattgggcagttggcagactcgtttacgaaaatggctagtgaactcaaaaaatctgaagcttcccgtcaagaatttgtcgccaatgtttctcatgaactacaatctccgctcacatccatgcaaggctttgcgagacttttaggttctggaacactaaccgaaaaagaacaagccgaatatttaaccgtgttatcagaggagacaacacgtctatcttccttaaccaaacaactactcacactcgcttcacttgaccaagaatcagagttgcgaaaaaaagagccagttcacttagacgagcagtggcgtcaattaatccaaatgaccgagtggagttggcgcgaaaaagaactaacaataaatttagacttagcagatgtaaactatacgggtgatgctgaattactttatcaagtgtggtccaatttgttaactaatgcgattaagttcacaccacagggcgggaatatcaaagtccacctttatgaaaaagcgacgtatgtttttgtagaagttcaagatagcggtgtcggcataggtaaggaggatatggccaagatttttgaccgtttttataaagctaacgaaagccgaacccgagaagaaggctcgagtggcctcggattatccatttgccagaaaattatcacgctccatcacggcgaaataaccgtgcaaagtagccccgaaaaaggcacgacattcaaagtcaaactaccaaaaaactaaatttgtaaaatccgattcacattccgtttacaaaacttctttaaactaaggataagatcttagaaggagttgaacggaatgtttttggcattaagagaattaaaacacgcaaaattacgctatattctaattggattaattatggtgttaatcgcatggcttgttttgtttgtaacgggacttgcgaatggacttgcaaacgacaatggggcagccatttcatccaataaagcaacttattatgttttacaaaaagactcggataatcgcttaacgaggtccaatttaaccgcgtccgaaacagacagcgtagcgaagcaagtgaaaaaatcagaaagcaccaacctaggcgtgcaaatgggcacgatcacaccacccaacaaagataaaaaaacagacattacttatttcggtatagataaaacaggcttcatgaaaccggccatcacagaaggaacagagccagagaaaacaaaagaagtagtagccgatatttctttaaaagagtctggttataaattaggcagcaaactcaaagatagcgcaacaggagaagagttcacgattaccgccttcaccaaaaataacacatttagccattcaccggttatattcgtcggctgggatgcttggaaattagtgcatcaaacgaaccaagcagcagaaggagaatataacgccgtagcgctagatgtttctgaaagcacagctaaaaacctatcactcggctccatggaactttcgtctagtaaagaagtgcttcaaggtatccctggctactcagaagaacaaggatcgctactgatgatgattgcctttttgttcgtcatcgccgcatttgttctagctgctttcttttacgtcattacgattcaaaaaatcaaccaatttgggattttaaaagcagttggcgcacgaacagcctatttaggccgaagtatcgttacccaagttgttttcctatcagttgtcagtttgttaattggtaatggcttaacattcggtcttgcagcaattttaccggcgagcatgccatttacacttagcccggtacttgcaatcggctgttctgccttattccttgttgtagcagtcattggatcgatgttatcactctatcgtgtagcaaaagtagacgcgttagaagcaattgggagggcaaactaatgactttaatgatgaaaaatatttctaaaaattatcaggatggcgagcaagtcatcgaagtattgaaaaatgtatctttagaagtggcgcaaggagaattcgttgcaatcgttggaccttcaggcgccgggaaaagtacatttttatctatcgcaggcgccttattatccccaacagaaggagaaattgctataggtggaaaagtgttaaatgaccttacaagcaaagaattaacaaaagtgcggctcgataaagtaggattcattttccaaggtgcgaacctaatcccgtacttaaatgtccgtgatcagttactcgtaattgcggaactatctggtgaaaaagggcggggtgcgaaagaaaaagcagatgaattacttaaagaattaggtttaactgctcgcgaaaacaattacccggaaagtttatcgggtggtgaaaaacaacgtgtcgctattgctagagcactgatgaacgaccccgatattattttagcggacgaaccaaccgcaagcttagatgcgaaccgtggtcacaaagtagtccaaatgattgcggatgaagtaaaacgaaaaaataaagctgccatcatggttacgcatgatgaacgagttttagacttagttgaccgcgtaattcggattgaagatggctatttgaaggattaaaaaaggattggnnnnnnnnnnnnnnnnnnnnnnnnnnnnnnnnnnnnncnnnnnnnnnnnnnnnnnnnnnnnnnnnnnnnnnnnnnnnnnnnnnnnnnnnnnnnnnnnnnnnnnnnnnnnnnnnnnnnnnnnnnnnnnnnnnnnnnnnnnnnnnnnnnnnnnnnnnnnnnnnnnnnnnnnnnnnnnnnnnnnnnnnnnnnnnnnnnnnnnnnnnnnnnnnnnnnntnnnnnnnnnnnnnnnnnnnnnnnnnnnnnnnnnnnnnnnccctnnnnnnnnnnnnnnnnnnnnnnnnnnnnnctnnnnnnnnnnnnnnnnnnnnnnnnnnnnnnnnnnnnnnnnnnnnnnnnnnnnnnnnnnncctt

SEQ ID NO: 3787 - DNA, 5571 bp, Listeria monocytogenes 4b
  misc_feature (1)..(end): n can be any nucleotide: a,g,c or t/u
tgcaaaacgtgctggaattatggtaaaagacttttcaattggttttggaccgaaaatttttgcttatcgtaaaaaagaaacgcaatatacgattcgcttattgccgattggtggttacgttcggatggctggggaagatggcgaggaaatcgagctaaaacctggttaccgagtagggctagaattaactccggaagaaacggttagcaaaatcattgttaatggtaaagatcaatatgtaaacgcgcagccaatagaagtttctctctgtgatttagagaaagaacttttcattgaaggctacgaagattacgatgacaccaagaaagttcgctatcaggtagagcgtgatgccttagtgattgatggtaaaatcgaaacgatgattacgccatatgaccgttcttttaatgctaaatcattaggaaaccgggcaatgaccatttttgctggaccgctttttaactttattttagctattttaattttcacagcacttgcttttgtacaagggggcgttccaagcaccgataatacgcttgggaatgttctaccggacggggctgctgctgaagctggtctaaaaaaaggggatgaggttctttccatcaatggaaaagaaacgaaatcttggaccgatattgttcaaagtgtttcggaaaaccccggaaaaacacttgacttcaaaattgagcgagatggcaagacacaagatatcgatgtcaaacccgcaacacaaaaagaaaatggcaaagacgtaggaaaaatcggtgtagagacaccaatggactcctcttttactgctaaaattacgaatggatttacgcaaacatggaattggattgtacaaatatttacgattctaggaaacatgtttactggcggattttcgctcgatatgctaaatggcccagtagggatttacacaagtacgcaacaagtcgttcaatatggctttatgactgtactaaactggacggctgttttaagtattaacttaggaattgttaacttactaccgttaccagcactagatggcggacgtttaatgttcttcttatacgaactcgttcgcggcaaaccaattgaccctaaaaaagaaggcattatccattttgctggatttgcacttttaatggttctgatgattcttgtgacatggaacgatattcaacgtgcatttttctaaaaaagagatagactaataaagggaaaaaggggtgttttaaatgcgtcaaacgatgacatttataccaacattaaaagaagtaccagcggatgcagaagtaaagagtcaccaattacttcttcgtgctggttttataagacaaacagctagtgggatttatagttatttaccacttgcaacattgatgttacgaaaaatcgaaacaattattcgtgaagagctagaagcaattggcgctgcagaactgttaatgcctgcgcttcagcctgcggaactttggcaggagtctggtcgctggaacgattacggcccagaattaatgcgcctaaaagaccgcgcttctcgcgactttgcgcttgggccaacccatgaagaagttataactgcacttttacgcgatgaagttaaatcttacaaacgtttgccgcttactttataccaaattcaaactaagttccgggatgaaaaacgtccacgcttcggtctattacgtggtcgcgaattcataatgaaagatgcctattctttccacgcaaccagtgaaagtttggatgaagtgtataacttaatgcaccaagcttattcgaatatcttcactagatgtggtcttgagttccgttctgttattgcggattctggttctatcggtgggaatgaatcaaaagaatttatggcattatctgatattggcgaggatacaattgcttatagcgatgcttccgattatgctgccaacacagaaatggctccagttttatatatggagaaaaaatcgcatgaactagaaaaagatatggagaaagttgcgactcctgatcaaaaatcgattgctgatatcgttgagtttttagaagtaccaattgaaaaaacaatgaaatcgatgctttatcaagtcgatgatgaagtcataatggttctcgttcgcggtgaccatgaagtaaatgatattaaaatcaaaaatgcattagatgcaaccaatgtagaattagtggatccagctgttgctgttgaactattaggagctaattttggttccctaggaccaatcaatgttcctgaaaacacgcgcgtctttgcagataatgctgtgaaagatatcgttaatgcggtagttggtgcaaacgaagatggtttccattatattaacgtgaaaccagatcgcgatttctccgttactagctattttgatttacggatgattcaagttggtgatttatctccagatggtcaaggcgtaatcaagtttgctgaaggcatcgaagttgggcatattttcaaacttggaacgaagtatagtgaagcaatgaatgcaactattttagatgaaaatggtcgagcacagccaattattatgggttgttacggaattggcgtatcacgtattttatctgccattgctgaacaatcaaatgatgaaaatggttttgtttgggataaacaaattagcccatttgatttacatttaattcccgttaatatgaagagcgaagagcaagttgcttttgccgaaacactttatagctctttacaagatgctgggttcagtgtgttaatcgatgatcgtgcagagcgtgctggagttaaatttgctgatgcagatttaattggcttaccgattcgtattacagtaggtaaaaaagcagcagaaggcgtagttgaagtgaaaatcagaaaaactggcgaaatgattgaatttttttttagatgagttactaaacacgctgcctatactcctcgccgatnnatnntttnttgagcnattcgtgccngntggaacaacaaaagttcctataaaaacgggttatgaggaacccctggctttaaaaaatttaaataaaagggtgttattcggaatgactgcaaaagaggaagaaaaacaagaacgatttctgctgttaatgactcaaatcggtttacaagatgtaacaacttacgaagaatttacaaaagatgctaaaatcgaaaaactcgttgccgacaagaaaaataaaacatggcaatttcatttacacgttccacaaatttttccagcagcacttttccatatgatggatgttggaatgaagcgtgcgttcagccaaattgcggaaacagaaatgcaaattgttccagaaaatcaaacaattgacgaaacactcattcaggattattggaacttaatcgtagagccaattgggaagcagtcaccgatgattggaaagcttttaatggagcaaaaacctacatttaaagaacctcattttattgaagtagcggttcataatgacatggaagaagcgactattcagcaacgattccagacgaaaattattgaaagttacgggaaagctggatttccacgccttgccatgaaaatgcacttgcttgaccagtctgaaacagaggaatataaagcttttgcactggccaaacaagaagaagatcagaaaaaagccgctgaagctgtgcaagttatgcaaaaacgacaagcagaagggcaaagcggtggcggtggagctgctccactaactggtccgttccaaattggttataaaattaaagacgatgaagaagttaaacgtcttggggacatttatgatgaggaacgacgtattaccgttcaaggcttaatcttcgcgacagaaattagagagcttcgcagtggtcgtagtttgttacaattcaaaattactgattatacaagttcaatgattataaaaatgttttctcgtgataacgaggatgcggcgatgttccagaatttgaaaaaaggtatgtgggttaaagttagaggaagcgttcaaaacgatactttcgtgcgggacttaatcatgatggcgcaagatgtcaatgaaatcgctggagtgaagcgtcttgatactgctgaagaaaaacgcgcagaactacatcttcattctccaatgagtcaaatggatgccacttcatctgttgattcactgttcaaacaagctgctgattggggacataaagccattgctattactgatcactctgttgcccaatctttcccagaagcgtatggagcagggcaaaagtatggcttaaaggttatttttggcatcgaagcaaatcttatagatgatggtgtgccaatcgcttataacgatcaacatattgctttggaagatgcaacatattgcgtatttgacgttgaaacaacaggtttatccgccgtttatgatacgattatcgaacttgctggcgtaaaaatgaaaaatggtgaaattattgataaatttgaagcttttattgatcctggacacccgctttctgcaaccactattaatttaactggtattacagatgacatggtaaaaggttctgatccaattgatgttgttttaaaaagatttaaagaatggagcggtgatgatattcttgtggcccataatgcttcttttgacatgggttttattaacactgcttatgaaaaagttggactagaaaaagcagaaaatgcggttgtcgatacattagaattagcacgttttctttacccacattttaaaaatcaccgcttgaatactttgacaaagaaattcaatattattcttgaacaacatcaccgggctgtttttgatgcggaagctacagcgtatttggcttggaagttaattaaagatgcgaaagaaatgcacaacatcgattttcacgattctttaaatgactatatgggagaaggcgacgcatacaagcgcgcgcgaccattccacgccacaatttacgcacaaacggctgttggtttgaagaatctctttaaattaattacgatgtccaatattaattacttttaccgggtgcctcgtattcctcgctctcagctaaaaaaattacgcgaaggcttaattattggaactgcttgtagccaaggggaactatttgaagcaatgatgcaaaaagggatgcaagctgcagaaaaagtagcggagttctatgatttcattgaagttcaaccgaagccagtttatgcaccgcttattgaacgtgaactagttcgtgacgaaaaagctttagaagaaatattgaaaaatatcgtccgcgtcggtgagaaaactggaaaacctgtcgttgcaacaggtaatgtacattacaaagatccagtggataaaatttatcgtaaaattttaatccattcgcaaggaggagcaaatccgcttaatcgggctgaattacctgatgttcatttccgtacaacggatgaaatgttgaaagaatttgccttccttggtgaagaaaaagcaaaagaaattgttgtaactaatgcgaatttagtcgttgattggatggaagaccttaaaccaatcaaagacgaattatatacaccaaanattgatggggcagaagacgaagttcgaaatatgagttatgcgatggcacatcaa

SEQ ID NO: 3788 - DNA, 4920 bp, Listeria monocytogenes 4b
  misc_feature (1)..(end): n can be any nucleotide: a,g,c or t/u
aagaggatattgcgatttcagtagatgaaagcgggaaagtgttagatactgcgagtgaagcgcttagtacgattcgccgaacactccgccgtaccgaagaccgcgtacgtgaaaaactagaatcttatttgcgcgatcgtaatgcctctaaaatgttaagcgatgcggttattacgattcgaaatgatcgttatgttatcccagttaaacaagaatacaaaggtcattatggtggtatcgttcatgaccagtctgcttccggtcaaacgcttttcatcgagccacaaagtgtagtggatttaaacaacgaacgaaaagcacttcaagcaaaggaaaaacaagaaatagaacgcattcttgctgaaatttctgcttcactagctgcttggattaatgaaattcatcataatactttcatcctcgggcgctttgattttattttcgccaaagcacgtttcggaaaagcgatgaaagctgtaacaccgcatttgagtgatgctggtgtcgtccatttaatcgccgcacgccacccgcttttagacgctgcgaaagttgtagcgaatgatatttatttaggcgaagatttcactaccatcgttatcaccggtccaaatacaggtggtaaaacaattaccctgaaaacattgggattactaacactcatggcacaatctggacttcaaattcccgcgcaagaagattctactatcgctgtttttgagcatgtatttgccgatattggtgacgaacaatccatcgaacaaagtttaagtacgttctcatctcacatgacgaatattgtttccattttgggaaatgttaatcagaaatcgcttattttgtacgatgaactcggagcgggaacagacccacaagaaggtgcggctttagcaatcgccattcttgatgcaagccatgcaaaaggtgcaagtgttgttgcgacgacccattatccggaactaaaagcatatggatataatcgcgttcacgcaaccaatgcatctgttgagttcaatgtcgaaacacttagcccaacttataaattattaatcggtgtacccggtcgaagtaatgcttttgatatttcacgccgcttaggattaagcgaaaatattatcactgaagcaagaagccttgtcgataccgaaagtgccgatttaaatgatatgatttccagcctagaagagaaacggaacttagcggaaaccgagtatgaggaagcacgtgaattagctcgcggggctgataaccttttaaaagatttacaaaaagaaatcagcaactactatcaacaaaaagataaattaatcgaacaagcgagtgaaaaagcagcaactattgtggaaaaagccgaagccgaggccgaagaaatcatccacgaattgcgcaccatgcaattaaacggagcagcaggaatcaaagaacatgaacttatcgatgccaaaacaagacttgggaatgctaaaccaaaaacaataaacaaaaccatcccacaagcgccaaaacaaaaaccacatgtattccaagaaggcgacaatgttcgtgtcctctcccttggccaaaaaggcacacttttaaataaaattagcgataaagaatggaacgtccaaatcggcatcatcaaaatgaaaatcaaaactactgacttagaatacattcaaccagaaaaaccaaaaaaacaacgtatcattacatccgttcatagtagtggttctccagctaaaagcgaactcgatttacgcggcgaacgatatgaagacgcgctacaaaaagtcgacaaatatctagatgaagcactactcgcaggatatcctcaagttgccattatacacggtaaaggaactggtgcccttagaaccggggtcacagaatatctgaaaaaccaccgcatggtcaaatcaatccgtttcggcgcagcagcagaaggcggaaatggtgtaacgattgttgagttcaagtaaacaactgagcaaaaacatggctccaaataggtctaggtgctatactgtgtgtacgaaagtcataaggagtgaattaaatcatggtaaaagaaattacagatgcaacattgaacaagaaactagcgaaggcttagtattaacagatttctgggcaacatggtgtggtccttgccgcatggtggctccagttttagaagaaatacaagaagaacgcggcgaagcacttaaaatcgtcaaaatggacgtagatgaaaacccagaaacaccaggaagttttggtgtgatgagtattccaacacttcttatcaaaaaagacggcgaagtagtagaaacaattatcggctaccgtccaaaagaagaactggatgaagtcatcaacaaatacgtttaaaattatgctaaaatgaaagaagcttagaacaaacattctaagcttctttttaaatgtgtaactggagttgataaaatgtcttctgaacatatccaaaataaactagcgcttctgccggaccaacctggttgttatttgatgaaagatagacaaggaaccattatttatgttgggaaagcaaaaattttaaaaaatcgtgttcgatcctatttttcaggaacacacgatagtaaaacgcaacgcttagttcaagaaattgtggactttgaatatatcgtaacatcatccaacgtagaagccttgctactagaaatcaatttgatcaaaaaacatgatcctcgttttaatattcgcctaaaagatgataaaacttatccgtttattaaaatcacgaacgaacgacatccacgcctaattattacccgtcaagtaaaaaaagacaaagggaaatattttggtccatatccaaatgtgtatgctgctaatgaagtaaaacgtattttagatcgactgtatccattacgtaaatgcagtacgctaccaaataaagtgtgtttgtactatcacctcggacaatgccttgccccgtgtgtatttgacgtggaagcaagtaagtataaagaaatgcaagacgagatagtcgcattcctaaatggcggctataaaactgtcaaaaatgatttaatgaagaaaatgcaagaagcagctgaaaatatggaattcgaaaaagcgggtgaattccgcgaccaaatcaacgcaatcgaaacaacaatggaaaaacaaaaaatgacgatgaacgatttcgttgaccgtgatgtctttggttatgccattgataaaggctggatgtgcgtccaagtattcttcattcgtcaagggaaactgattgagcgcgatgtctcccagtttccattttataatgatgcagatgaagatttcctcacatttattggtcaattttaccaaanagccaatcatattccgcctaaagaaatttatttaccagatgatgtcgatagcgaagccgttcaagcggtcgttcctgacacaaaaatcatcgtaccacaacgcggaaataagaaagatctcgtaaaacttgcatacaaaaatgcgaaaattgccttaaacgaaaaatttatgctacttgaacgtaatgaagaacgcacagtcggagcagttgaacggcttggagaagcaatgggaatcccaacaccgtcacgcgtcgaagctttcgataactcgaatattcacggtacagacccagtttccgcgatggtcacattcctcgatggcaaaccaagtaaaaatgattaccgtaaatacaaaatcaaaaccgtagaaggacctgatgattacgcaacaatgcgcgaagttattcgacgtcgttactggagagtacttaaagaagaactaccaatgccggatttaatcttaattgatggtggtaaagggcaaattgatagtgccaaagatgtcctaacgaatgagctaggcttagatattccagtagcaggacttgcaaaagacgacaaacaccgtactagccaactattattcggtgacccacttgaaatagtcccactcgaacgaaacagccaagaattctacctattacaacgaatgcaagatgaagtccaccgtttcgctattacattccaccgccaactacgcagcaaaacaggcttccaatccattcttgacggcatcccaggagtaggacccggtcgcaagaaaaaattacttaaacacttcggctccatgaaaaaattaaaagaagcatcggtagaagaaattaaagaagccggtgtccctttgaatgttgcagaagaagtgcataaacacatcacagcattcaatgaaaaagcaaaaaataccgagcaaaaatgattttaaacacgattttaaacgccaataactttgatgttattggcgttttattgcataaaaattgttactaacatgtcagattaaatagcttttacatataataaacttcccttcaacacataaatgcgctaaaatataaacattgataaaaaagaactaacaaggcaggagggaacgagattgggactagtcgtattaaaatttggcggaacatcagtgagcacggtggataaaatcgggaaaacagcagatcaagccatttatgaaaaaaaacaaggaaataaagtcatcgtcgtcgtttccgcaatggggaaatcaaccgacaaattagtcgcgatggcagaagaaattagcgaggcaccagataaacgcgaaatggatatgcttctttctactggtgagcaaatcacaattgctttacttgcgatgacattaaaagaaaaagggcacgatgctatatcctatacaggatggcaagcgggaattgaaacagaagccgtacatagtaatgctagaattgccgatattgatagcgctcgtattgaatctgcgcttgatgcgggacaaattgttgttgtagcaggttttcaaggtttcacgacagatggtgaaattactacattaggacgaggtggatcagactccaccgccgtcgccatcgcttctgctgtaaatgccgta

SEQ ID NO: 3789 - DNA, 6308 bp, Listeria monocytogenes 4b
  misc_feature (1)..(end): n can be any nucleotide: a,g,c or t/u
ccttggaagttgtctccttggtcctcatttacgagtgcgatggtcatcttgtgtgttttttcactattatttttagactccttattcgaactttgattcaaagccaaataagtaattcctgccgaaagaaaaatcgccaagactaaaaagagtaaaatactccattttactttcttcattcatgtcccactcccgctgtgtcttttttatataaatacctttttaggcataagctttctatgtttagaaaaagccatgcaaaaaactgcatggcttttcgtaaagcatccaacgatatttgtatgtatgccccactttttgttgattttagaatccgaagttttgagaaagttgttgatcgtgctcttctactgcgtttgctgtcttctcaagttgatcgttaatttgatccattaagtttgcgaattcagttacttttggttttaattgttcaaattgatcatcaaaacgcataaaagcttgaccttcccattcgctacgtagttgttcttgtagttgacttaaacgacttagaatatcctcaatatcccgaccactttgaccgtaagttttcgcgcgatcacgtagttcgcttggactcatacgaatttgacctgacattcacttcatctcctcttattatctattgtgaataagatatcactctcaaattataacatgaattcacaaagtaaaatgtgacaaaaatacgaataaaactcctataaagacttgataataggtcttttaaaaacaacatcactatacaaaaagatgcctttttcacaaacaccttccccttttgttaactttttcaatttttcggataaaaaattgtatacttttccagaatcactattatttttatacagcaaaaaagcccatccaagaatacaccttagatgggcttgatatttattttattaagctaaacgccaaacgcttttaatgacatgtgtttgagcgcgatcagggcctacagagaacatagaaacctgcacaccagttagctgtgcaatacgctccatgtaatggcggcagttcaccggaagatcatcgagtgatgtaactccagtaatatcttccgtccagcctggaagttcttcatatacaggttcgcaacgagctagatctttcagacttgccgggaactctgtaattgtttttccgtctaatttgtaagctacgcagattttaagtgtttcaattcctgtcaaaacatccagtagtgttaacgataaatctgttaagccactaacacgacgcgcatggcgaaccactacactgtcaaaccaacctacacggcgcggacgaccagtcgttgtaccatactcatgaccaacctcacggatagtgtccccaatagtatcgaataattctgttgggaaaggaccatcaccaacacgtgttgtataagctttcgccacaccaacaacatgattgatttttgaaggacctacgccactaccgatagttacgccaccagcaatcgggttacttgaagttacaaatggatatgttccttgatcaatatcaagcataaccccttgcgcaccttcaaataatacacgtttaccatcatctaatgcgtcatttaaaacaacagatgtatcgcaaacatattctttaaattgttgaccatagtcataatattcttctaaaatatcttctagtttaaagccttctagttcgtaaaaacgttctaataaacggtttttctcgccaagattatgctctaatttctctttaaatgtttctttatctaataaatcaataatacgaatacctacacgcgctgctttatccatgtaagctgggccaataccttttttcgttgtaccgattttgtttgcgcccttacgttcttcgtcagcttcatcaatacgaatgtgatatggtaaaataatgtgcgcacggttagaaatacgcaaattagaagtatccacgcctttgtcatgaagatattttaattcctccactaaagcttttggatccacaaccataccgttaccaataacactaattttttctttgtaaaagatacctgatggaattaagtgtaatttgtacgttacgccatcaaacttaattgtatggcctgcattgttcccaccttgatatctagcaatcgcttctgcattttcggaaagaaaatctgtaatctccccttttcattcacgcatccgatgtgatccaactacatcacctgaagacatttgcacacctcatttgattggtcttttatagctatgcgttattcatagcctcttcattttccgctatacattgtaccgtctgccaccaaaatagtcaatggatttgcgagccttgatttgtaaggtaattttatcgttcgcttttttaatctttttgcgggaatttcaaagtccattaatagtaatacgttacctttctgcataaaataaaaaccttgcgaactccaaatctaatttgaatttcacaaggtttcctcattaagccattgcgtcgtcgtaccgcacttctaaattcacaaacttattgtattcttttacaaaggctagtttcacgtcaccaactggaccattacgttgtttcgcaataataatctcaatcgtgccatcattttcaccttcccggtcatagtaatcttcccggtataaaaaggctacgatatcggcatcttgctcaatcgaaccagattcacgaatatctgacatcattgggcgtttatcttgacgttgctctacactacgagataactgcgaaagtgcaattactggcacttcaagttctcgcgccaaagcttttaacgaccgagaaatttcagaaacttcttgttgtctattttcgccaccacgaccgctccctgcaatcagttgcaagtaatcaatcacaatcataccaagaccagtttcttgttttaaacggcgacatttggaacgaatttcattcacccgaacacccggcgtatcatcaatatatatccccgaattagaaagtgtacccatcgcgattgtcagcttttgccaatcatcgctcgttaaagcacccgtccgtaaattctgcgcattaatatttccttccgcacaaagcatccgcataacaagttgttccgcacccatttccaaactaaaaatggccacattctcgtcggttttcgttgcaacattttgcgcaatgtttagggcgaatgctgttttaccaacagaaggacgcgcggcaacaataattaaatcattccgctgaaatccagctgtcattttatccagctcgttaaatccagttggaatcccagtaatatcacctttgcgattatgcaaaatttcaatatcatcataagttttaactaggacatctttaatattcttgaatgcaccaacatttttacgttgcgaaacttccaagatactcttttccgcttcgtccataagcatatcgagctcgtcttcgcgcgaatatccatctgttgcaatttgggtagcagttctaattaaacgtcttagaagcgccttgtcctcgataatatgggcatagtattccaagttagccgcagtcggtacagcaccggataattccgtcaaataaggcaaaccgcccgcatcttctaaattacccttggcagcaagcgcctcatatactgttaaaacatcgacagccttcccgtggtcgttcaaatcaagcatcgtttcgaaaatgatttggtgaccagttcgataaaaatcatccggcattaaaatttcagaagcggtaatcagcgcattcggctcaagaaatatcgcgcccagtacagcttgttcggcttcaatattttgtggtggtgttctgtcctggaaattattatccactgtcttacgctcccttaagaaaaattattcttcactcacatgtacatcaagtgttgccgttacttcatggtgcaacttcaccggcaccttcgtatgccctaaagctcgaattgcctctggtagatccattttacgtttatctattttaataccatgtgttttttcaagcgtttgagcaatttgtttagatgtaatagaaccaaacaatctgccgccttcaccagacttcgcttttaattccactgttaaattttccattttttctttcaaagcttttgcttcagctagttcttcagcagctaatttatcttcttttttcttttgcgctgaaagagtgcttaaagccgcattattagcctcaactgcgtaaccatttttaattaaaaaattgtttgcataaccatcagcaacatttttagtttcaccttttttacctttaccttttacgtctttcaagaaaataactttcataattatgtttctcccttccaatacgcatcaatggcgctaattaattgtttttctgcttctgcaattgtaacatctttaagctgtgtggctgcattcgataaatgtccgccaccgcctagtttttccataatgacttgcacattgatttgaccaagcgatctcgcgctaatcccgattaatttatccggacgtagcgtaataacaaaggatgcctgcacgccttccatcgaaagcatcgtatctgccgcctgcgcagctataactgtgccaaattcctcgtcttcatgtccagtcgcaatcgccataccatcatgataaatttcaagcgactcaactaaacgactccgctgagtaaaagtagtaatatcttccttcaaaaattgctgaaccaaaatcgtgtccgcaccaagcgaccgtaaatagctcgccgcatcgaacgttcgcgacccagtccgtagcgtaaagttcttcgtatcaaccacaatcccggaaagaagcgccgttgcctcgattttcccaacctgctctaaatccggttgatactcaaacagctccgtaatcaattcggcagtagaggacgcatatggttcgatataaacaagcaccgggcttccgacaaaaaatctgaacgacgatggtgatcgacaaccaccacattcatgacgaagtcaagcaattccttattaataaccatcgaaggtttgtgcgtatcaacaaccacaagcaaactcttctccgtgatattttctagcgcgacttgcggtgtaactatatttttaatcacatttggatattcttcaatttcattcattaatcgcttcacatctggactcattttgccaggttccacgaccacataagcattccgatcattcatctccgcaatccgcatcactccaagactcgaaccaattacgtccatatccggatagcggtgccccataacaaaaacttggtcactttgcgtaatcaactcttgcaaggcttgcgagataacacgtgcgcgaacacgagtccgtttttccatcggatttgttttcccgccataaaaacgcacttttccttcaggttgcttaattacgacctgatctccgccgcgccctaaagcaaggtccagactagactgtgccaaatcggccagctgaatcaaatcatcttccttataaccaatcccaatactaagcgttaatggaatattttgcttcgacgtccgttcgcgaatccggtccaagatttgaaacttctcttcctccaaccgcttcaacatttcctccgtcaaaaaggccataaagcggtctgtcgaaatccgtttcaaataaatacgatgttctctggcccagttagtcaacattgacgtcaccaaattatttaaagcactgcgacgtctatcatccatgccctgcgcccattcatcataattatctaagaaaataaccgcaaaaacagatttattcgcctgaaacttcttatttaaatcataatattctgttcggtcatataaatacaaaatccgttccttacgctttactatcgtatcaaaacggtgatcacgccaagcaatcgacataatccccttctcatcattcccagtaataacgtccaaaaattcaggtcctacttcttccaaagattccccaattagctctgccttatcaaagtatttcgacataaacgggttaacccattcgattttgtaatgttcatcatacagaagtattcccatcggcatctcaacaagcgcttcttcttcactacgcttaatccgatacgttaaattagaaacatatagttgcacatcttcattcaagcgatattcaaaataaaacatcgcaaccgtaagaataattccgccaacaacaactaacgccgatagccaccacgaaaaaaagaacgtgattacgctcaaaataattgtcgctgcaatcagaccgtatagtggatatttaagcattcgtttttgaaaatagcctgacatttcatccagctccccatttttttacataccttttg

SEQ ID NO: 3790 - DNA, 4504 bp, Listeria monocytogenes 4b
  misc_feature (1)..(end): n can be any nucleotide: a,g,c or t/u
tacgagtgaatttgctctaatggacgtactcaaagcattattcgatattaaaacgaccaccaaccaatatgcgtttattacgggcgtaaatccttttattgatttcgatttgctcaaaaaaacggcagatactttttatgaaaaaggaattccgtttatcgtgagtgcggggcctgttttttacaatcaagatttccaagcggcgaaaaattatgcggagattttgcgctacgttcaagcaaaaaacggcacgattatgatgaacgttccagcagtgacgtacggagatagtccagcgggagaacttgaaaagattatgcaaaaatcggtacatttcttcgcggaaaatgacgtcgcaccgcttggagttacagcagaactgtactggaactttgataaagtatatggcgtagaaggtttcgcaccgtttaataccgggattttgctaccaaatcaaaaaatcatccatacgacgaaagtaaataatggcagtgcatttgaaaagtctccgtatagcgtggcgaacgatttttatgcgactacgactgaagggagaaccttcccggtcgatatcgcgataacctatcccttctttgataacgagaaagaattaaaagcagctgctgaggaactagcgaacgacaatattagtgattttagattccaagatcatggggtaaaaacaaataaggatacgattgaatcgagtgcaggctcactttatatcaataatcaatccgttacgctcgatggcgatttaaactatattaaaacgaaaaataaaacagtcaaacaggcgggcagtttagaagggttcttcggctatcaaaacacctttttcacgatagtaattgtactttcacttggcattattggggttttatttgtctttggataccggctttacatgaaaaaatatatgaaatgaggtgaaataaatggttattgcagattatttagcattattcgcggtggtgtgtatttggggacttttgctaattaatatagtgttaattgttgcaggatatgtttattatttgaaaaatgaagcgcgaaaagtgcccgaaataccagcggaagtaccatttgtttctgtcatggtgccggcccataatgaaggaaaagtaatcgtgaaaacagttgaatcactgcttgcttttgattatccggtcgatcgttacgaaattattgtcattaacgataattcttcggataatagctcggaactcttagccgccattcaagcaaaaaatccaacacgctttttaaaaattattaataccgataatattacaggcggaaaaggaaaatcgaatgcgctcaatattgggtttgcggaaagtcgtggggaactggtggcgatttatgatgctgataatacaccggaacggcaagcgctaagaatccttgttggtgagattacaaatgatgcgaaacttggtgcagtcatcggtaaattcagaacccgaaatcgaaatgcaagctggttaacgcgatttatcaatattgaaacgcttagttttcagtggatggctcaggccggcagatgggcccttttcaaactatgcaccattcctggtactaattttattgtaagaaggtcgctcctagaagaaatcggtggctgggatgtgaaagctgtcgcggaagataccgagattagctttcggatttacatgatgggttaccgaatcaaattccaagcgaaggctgttacgtgggaacaagagccgcaaacattaccagtttggttcaaacagcgctcaagatgggcgaaaggcaatatttatgtaattttaaaaaacgttccactccttttcaaacgagaaggtaggcgcgttcgctttgatattttatactttttatcgatttactttttattattaacttccttgattgttagtgatgttttactcgtattatatgcgcttggacttgtacatacaactcttgctggccttagcggggcactttggttgctagccattttactttttgtcgcaggtacttttattacactcaccacggaaaaaggcgaaatcagtttttcaaatttgttatttattatgttgatgtatgtgacgtattgccagctttggatggtggtcgccgcatatggattctttattttcttaaaagataccgtactaaaaagggaaaccaaatggtataaaaccgagcgtttctaaaaaggagagtgcctaatgaaaaaattaactgtaatcgggttgcttatgttcgccgtactatttctgtataggccagacgttctcgcagcagataaaaactatcaaacggtttttggaacagataaaaccgcccaaggaaaattcacaaccaccaaacaaaacttcacggtggaaaactactgggatgtatcaaacgctaacgtaaagcttgtgtatacaattacccaactgagcgaaaaagaagtttccacgatgacactgaaaataaacgatgttgcgttctactcttttaaaccagataaagcagacaaaggaacaaaacagattgaaatccaaattccgaaagataagttaaaaaaaggagtcaatgttctatccatcgaaagctttgtctacactgatttgcctgatggtcgttgtacgattgacgatacacctgccaactggctgcaattcgataaaacaagcgcagtaaacgtatcttattccgataaggctttccaaaaaacgattgccgagtttggcgagcgcttcactggaattgatactgtgaaaagtgaacaaggcgcagtagctgtctcaaacaaagccggcgatgccgaacttggcgcagcacttgaaggtctttccggattttctgcagcgaatacgttagaagataaaaatatcgcttttggtcaatacgaggaagcaaaaacgcgtgacggtaaaaactatctcgtacttttttcaagctatgacaatttaccaaatgatctaaaatcacaaataaaagacgataataaacttgaaaaacaagcacttttccaagtagtgacagtcggaaatacgaatacactcgtggttacttctaaatccaacgatgcactaaaaaaagctggcaaactaatcgccaaccaaaattacttaagtcagcttggaacaaatactaaatggctaacaacagacgaaaaaatcgacacaccagcgactaatgttgacaaaaatacgaaactaacaacaactggcgataaactaaaaggcattggtcatatcacacaagattacttcatcagcatgccagccaaccgtagcgcatcaacaggaacagaagtatcacttgattttagatatgcgcaaaacttggatttcgagcattcattagtaacgattttagtgaacggcaaaccaatcggcagccaaaaacttaccgctaaaaaagccaatggcgacaaattaacgttccaaattccgagcgatttaaacgtaaaaggggatttttcagttaccgttgcctttgatttagttttaacaaataactattgtggctttattgcagattctgaaatcccgtgggcgtatatcaccccagaatcaaaaatcaatttaaacacaagcgaagaaacagacttgctttttgaacaatatccgtacccatttattgcaaatggtgactttaacaatgcagttgtcgttgttcctgataaattaacgacagaagatacagattcattagcaaatattttcaatctgttaggccgcttccatgatggaaataggggagacttgactgccgtacatgccgccaactggaaaaaaccaaaagaaggatcgaatattattgcagttggtacaatgaataataatccagtaattaaaaacgccaatgacgacctatatttccagtacaacaaaacaggcgattacttcctttccaatgaaaaaatctcgattgaaaaaaattacggcaaacaacttggtagtgtgcagttaattacatcagatggcgtcccaattctggcagttactggtccaggtgccaaacaaacagaactcggatcggatttaatcgcaacaaaagccaacctagctaaaatttacggagatggcgccattgttgatactgataacacgatacattcctaccgattcaaaaaagcagcagatacacaggaagaaagctttgggtcaaaaatcagtaataacaaagaagtcactgtgttcggagcattcgcgcttctaaccgtcgttatcttagttgtcgctgtcctactaatcttgcgtaaatatcgccggagccggaagtgagggagaaataaaaaatgaaaaaaataacgaataacttatttgcagatatcggctttttatttttcatcttgctttgtttcatcacaattggctttatgatcaatacgccggatgaatatttgcgaaacattattttattaaatatcacctttttacttgtgattatcacctattttacgaacttaacgcttggtttgattttaaatgtcctctacatttttatttatgcaacttatattatttatgaa

SEQ ID NO: 3791 - DNA, 5738 bp, Listeria monocytogenes 4b
  misc_feature (1)..(end): n can be any nucleotide: a,g,c or t/u
aatttttcaggagaggaatggggtggcggaaatgagcttcatttgttagaagatgagagaattggcgtgcttggtcatattgcttgttttgatgaagcgggcaatcgtcattattacgcatgttcttttcgattgaatgaagatttttcgcaaattgagcaagaaaaaataattgccgaacgtgctaattttgcccctagtgagccgaaaagacctgatttagcggatgttgtatttagcggtgggttaatcagaaattcggacggtactgcgacactttatgcagggattggcgattctgatgcacaaaaattagcaattcctgatccatttaaaaataactaatagtaggagttttgagtagaaatgaacatttatcgttatgaagaaaacccattaattacacctttggacgtaaaaccaatccatgaaggttttgaagtgattggcgcttttaacgctggtgttgccgaatataacggcgaagtacttttacttcttcgtgtggcagaaaaaccagtcagtgaggatccagaagtagtccttgcgccagtttataatgcgaaaagtaaagaattagaattacaacaattccgattagatgatgaaaattatgattttgaagatccgcgaatgattcgcagtaaagcaaaactagaaggattttcttatttaacttctctttcatatattcgaattgctcgtagtaaagatggtcatcagtttaccttagatgaaaaaccgtttttatatccgtttaatgagtatcagacatttgggattgaagatgctcgtgtgacgcaaatcggggatacatatcacgtgaattttagtgcggtatctgagtttggcgtagcggatgcattagtgaccacaaaagactttgaaaatttggagtatcaaggaaatatctttgctcctgaaaataaagatgtactaattttcccagaaaaaattaacggaaaatattatgccttacatcgtccaagtttgaaaagtattggtaatttagatatttggattgcttcttctccagatttgcgcagttttggcgatcatcgtcatttgcttggaattcgtcctggtgaatatgatagtggccgagttggcggcggatgtgtgccgattaaaacagaagaaggttggttaattttatatcacggagcaactgaagagaatcgttacgtgatgggcgcggcgcttcttgatttaaacgacccaacgattgtactgaaaagaacgaaaacgcctattttagagccagttgccgattatgagaaaaatggctttttcggtgatgttgttttcgcatgtggggccattcaagaaggtgatacgctgcatatgtattacggcgtggcggatacttctatggcgggctgtgacatgaaaatcagcgaaattctacatcagttagaagtggaaaacaaatgacttggcaacaacatttgaacgcttggaaaaatgccgatttatcagatgagtggcgccgtgaattacaacgagtggaacaggagcaggaacgatttgatggttatttaacctttgggactggcgggatgcgcggtaaaatgggcgttggaacgaagcgcatcaatctttttaccattagacgagtagcgaaaggtttgggagattatgttgtcgcgaatggaggagccgaaatgggtgttgcgattgcgtatgactcgagacatcattcgggtgcttttgcgcaggaaacggcaaaggtcctggcggcgcagggagtcaaagtttatttatccgatacgattcgcccaacaccagcgctatctttttgcgttcgagaaaagggggcatttgcgggcgttgtgattacagcaagccacaatccttctatctataatggtttcaaagtatatgataaaaatggctgtcaaatcacattgggtgtagcgcaggaaattgctggctatttagaaaacacaacggatatctttaccataccagtgcgcgaattacccaatccactcgttatgacgctaggaaaagaaatggacgatgcttatttaaaagctttaacagcagtcgtttctcgccctgatttgcttgctgactacggtaataaactacagatttgctacacaccgcttcatggagctggaaaagaacttgttatgcgtgggcttttggaaaatggattttcggaaacgaccatgattgctgagcaaagtgagcctgacggggattttccgacagtggtttcgcctaatccagaagaagaaaacagttttgaactagccaaaaagcaggcgaaagaaatacaagccgatattattttggcgacagatccggatgctgataggctgggggtagctgttttaaacaagcaagctacgtatcaaattttaacagggaatcagctaggcgcattgcttttacagtatattttagaagccaaaacgtcggtaactcaggcggatacgatgattaatacaattgttactggggacttaggtggaagaatcgcgcatgactttggaattaatcatatccagacgctcacgggtttcaaatttatcggtgaaaaaatagccgaaatggaaggcacggaaaaaaactttctttttggatacgaggaaagttacggttatttaatcgcgccatttgttcgggacaaggacgccgttcaggcagcattacttacagcagaaatggcccttttctataaaaaagaaggaacaacacttcttcaaaaactaacaaatttatatgaaaagttcggctatcataaagaacacttgcacacgattacgctagatgatagcgatggaacaactaaaatgaatcaagtgatagacgatttgcgcaaagagccaacttgtattcccggcataacggttttagaagactttctaacgagtaagcgaaccaatctttcaacgatggaaatgacaaacatagagctaccaaaagaaaatgttttaaaattttacttaaacgataacgcctggtttgcaatacgtccttctggaacggaaccgaaatgcaaaatctatttccaaacaatcggtcaaacagaagaaatagcgacaaaagctatggatgagttgaaaaaatgcgttttagccaaatgggattaataaaaagctggaaattgttttcggacgattttcagcttttttttaaagatttatctataaaaatcgctgaaaaacccggataagcgtacatttaaaaagaattaagtttttttattcgataatagcaaggaaagataagcttttgacgttgaaaagaaatcgttagtgtgttatgatgatagatggaagtttattaggtttatatttagcctagtgattaatgagggcttttttatttgatgcgttagaactgctataatggcagagaaattttctgatgccgtgaatcattttgcttggtgcgcccaggcttttctattgcagaaaaatgaaaatgaaagatagcagttttcataaaaacaactgcaaatgaacagacaaacaatcgtaataagcgtattgtgatgaattataaaagtagctctcctaccaaactttaaacaggtaaaggagaaatgacattgacaaaattttcggagttcggactggacgaaaaaattgtaaaatcagtaaatcggatggggtttgaagaagcaacaccaatccaagaaaagacaattccactaggactagcaggtaaagacttaatcgggcaagcacaaacaggtactggtaaaacagccgcttttggtcttccaatgattcacaaaattgaccaaaagagtaacaacgtacaagctttaattattgctccaacacgtgaacttgcaatccaagtttctgaagagctttataaacttagctatgacaaacatgtacgtgtgctagcggtttacggtggtagcgatatcagccgtcaaatccgttcacttaagaaaaacccacaaatcgtagttggtacgccaggacgtattttggatcatattaaccgtcgcacactgaaactagaccacgtggaaacacttgtactagatgaagcagacgaaatgctaaacatgggcttcattgatgatatcgaaactattctaaaagaagtaccagcagaacgtcaaactttactattttctgcaacaatgcctgatccaattcgccgtatcggtgaacgtttcatgcatagcccagaacttattcgcattaaagcgaaagaaatgactgcactattaattgaacaattcttcgtaaaagtgcatgaaaaagaaaaatttgacgtattatctcgtttattagacgttcaagcaccggaactagctattgttttcggtcgtacgaaacgtcgtgtagacgaactatctcgcgcgcttgatatgcgtggttacgtggctgaaggtatccacggtgacttgacgcaagcaaaacgtatgagtgtactacgcaaatttaaagaaggaaaaattgatgttctagttgcaacagacgtagcagctcgtggacttgatatttccggcgtaacacatgtatataactatgatattccacaagatccagaaagctatgttcaccgtatcggtcgtactggtcgtgctggtaaagaaggtatggcgattactttcgtacaacctcgtgaaatgggttatttacgtattgtggaagaaactacgaaaaaacgtatgcaaccacttcaagctcctacttgggacgaagcatttgcaggccaattacgcgtagcaactgaaaaaattcaagaagcaatcacagaagaaaacttagctgactacaaaacgtttgctaacgaacttcttgaaaaatacgatgcaactgacatcgcagcagcaatgcttaaaatgttagcgaaagagccagacaaaactcctgtccatattactgaagagcgtccattaccatcccgtggtggcggtggctacaaaggtaaaaatggtaaaggcggcaaaggtggcggctatcgcggcggaagcggcaaaggcggaagctaccgcgatcgtaacaacagcggcaaaggtcgtcgtagcggcggcggaagcggttctggcggtggtggcaatcgtgatcgtcgtagtggcggcggagaacaacgcagcggcggcaacaaaggcaactactcacaaaaatctaaataagattattagacaaatagttaccatatagatagactgtagataaagaagtttttaactttatctacagtctatttttttataaatactaatgttaaggatacgggagtgtggcgctcgtcatgaagataaacaaaattatcgaatatattgtagtagcaatcatcgttttaggttggacttacttcattgttattaaagaaattctccctaaaaatataggatttatttcattagtaattttatcaataattctttattttgtaggcaaaaggttgaatgggaaacatagcagataaaaaaacggctatactctaagtagccgttttttatgtgcaataattcatttacattaacttccaaatatgagaaaatagcatgttggcaaaattgccacacgtggttcattcataccatcccacgtaaaaaaactaggaggaaaaataatgaaaatgaaaattttgacggtgaatgcaattatcgccgcactgtatgtagtgctcggtatgattgttgcaccaattgggtttatggcattacaatttagaataccagaaatctttaaccatctaatcgtctttaataaaaaatacttttggggtattatcgtaggtgtgtttat

SEQ ID NO: 3792 - DNA, 4197 bp, Listeria monocytogenes 4b
  misc_feature (1)..(end): n can be any nucleotide: a,g,c or t/u
tttgatcaacgtagatttaaccaatttcgaaagatttaattctttatctgaagtaattaaagagctttatggtattaatattctgcacgaagcgatgaaggagcgaattgaagtcgaatttccagtaaaagacaaaaataattttaaattactcgaaattgactccgagttaccactttaccacattgaaagaataacctatgtgccagaggggcaaccctatgaatatattgaaagctacttgcggcataatttttactctattgaaattgaaaagaaaaaacaatagaagggagttaattacttgaattttattatcgcagcacatggccggtacgcacaggaagtgaaaaatagctgtcagatgattactggccaaacaactaatatctcagcaattacttttaccgaagaaatgggggtgacggatgtattagacgcctacacggccgtttattcacccggaaatgaaaccgctatcatagttgatattgttggtggaactccgtgtaatgcggctcaaatgtttagtacaaaacatccagaagttaaagttgtatcaggtttgtcgctaggattactcattccacttagccttggagaaagtttagaggaggcgatgcttggagcaaaagaaaatattcaatttgtagagcaaaaagcgagttatacgatagtaagtgatgatggggaggaagaggactgatgggaagcaacggaattaaacacgtacgcgtagatgagagactaattcacgggcaagtagcaacaatgtggaccaatactataaaagcaacgcgaatcatgattgttgacgatgcggttgtaaaaaatgaaatggaaaaagttgccttaaaaaccgcagtaccggctggtgtcaaactaagcattctgaccgtaaaaggtgcagcaaataatatcaataatgataaatacgcagggcagcaagttttcttaatcgtaaaatcacctcatgctcttcgcggtttagtagatgcgggggtagaacttccccaaatcaatgttggaaatatgtcgactaaagcagggagccgacaaatcaaaaaatcagttagcgtgacggatgaaaatttggaagatttcgattacttgtctcaaaaaggcattaaaatcactgcccaaatggttccgagtgaagatgcggttgaatttgcaagtttattaaaaaaataagtgataagaagggagaactacaatggatttagcagtttggcagattatattgttagttatactcgcagcttgtaccattcttgatgctttaactttagtaataggacttaatttccctgtaataacaggaacgcttgctggaatcattatgggtgacatggtgctcggacttgcgattggggcaactttacagctgatggttctaggtgttggtacatacggcggagcatcgattcctgactttacaacgggagcaatcgtcggcacagtatttgccgttttatcaggtcaagatgcggaatttgcgattggacttgcaattccagtgggacttttaatggttcaattagacattttagcaagatttacgaatacatttttcttgcaccgcattgattctaatattgcttcgggcaacatttcggcggttaaaaggaacatttggtatggggcgctaccatgggctttatcacgcgcggttcccgtatttatcatgttgactttcggacaaagcgtggttgattttattctaaatgaaattccagagtggctaatgggcggccttcgtgtagctggtggaattcttccggtagttggtattgcgattctccttcgttacttaccaacaaacaaattcgtcgcttatttaattatcggatttgtagcagcagcttatctaaaagtaccgatgctaggcgtggcactaattggcgtggctttggcaatcatttactttaaacaaaatttcaaaaatccagtggctgccggagcaaatggcgcagcgctagttggggaggagaatgaagatggcgaatacgaagactgagcaggattttgaaaaagtactcaagagacgcgatttaatagcagcaaactttcgttggttgtttgccagccaaatatgttggaactatgagcgaatgatgtcgactggttatctttatagtattttgccaacgcttcggaaactttataaaacagacgatgatttaaaagatatgatgaatatgcataaccaatttttcaatacgaatcctatggttggtggtttgatcttaggaatggatatggcgattgaagagcgcgaaaagaaagcgtcaaaagaagtcgtaactggtttgaaaacgggtttgatgggaccatttgctggtgttggtgatacgattttcggggttattttaccgacgatttttggatcaattgccgcatatatgggacttcaaggtaatgtgacaggtgtggttatctgggtattagttaatattttggttgtgggagcaagattcaccttacttcctctaggatataagcaaggtgcaaaactagtgacggaatttgcggacaggcttaacgcgttaaccgatgcagcgattctgctcggggtcacggtcgtcggggcattaataccaaccgtaatcaaagcaactgtcccattcgtttataaatcaggaaaagtagagctcaaaatgcaagacatgctcgatcaaatcatgccatcactcgttccagttttactcgtggcgctaatctatgcacttttaggccacaaaaaaatgacatctacgaaggctattttattagtaatggttattgcgattattttattcaacctaaaaattctaggttaaaatataaaaattggaggaatagacaaaatgggtttaacattttttgacaaagcgcgtgaattaacggaggaactagaaaaaacacaggcggaaagtattcatcaagcagcaaaactggtggcagacagcatcatgaacgacggaattattcaagcatttggtagtgggcactcatatgcggcagctattgaagtatgtgggagagcaggaggactaattccatcaaaagttattatggacccagctggcggttattatgaatcgattgagggtgttggttccttgcttactcatagattacaagcgaaaccgaatgatatattcttccttatatctaattcaggacgcaatccaatgggaattgagcttgcggaatggattaaatcacagggctgtaaattaattgttgtaacagcacttgatgcctcgcaaacagcagcttcaagacactcttctggaaaattgttgtacgagtttgcggatgttattttagacaatcgttcagtccaaggggatgcggcacttgaattagatggattagaaggaaaagtttgcggaacctcttcattctcagccgttctgcttctccaacaaacaatctatgaagcagtagaacttatgcttgaaaaaggctatacaccaccagtttatcgtagtgcaaatattgatggtggctatgaatacaattttgcgattgaagacaaattcgctgatcgtattttccacttctaataaaaacgagcgcgaaaatgaacattattttcgcgcttttttggaggatagaaaatgattttaaaagaagcctgtattgaaaatacaactaatctggtgaacgttattgaagctggagctaatcgagtggagctttgtgataatctagcggagggcggaacttctgtaagttacgggattgcgaaacatgtggtgaaaatttgtcatgaacaaaatgtaagtgtaatggcaatggtccgtccccgaaaaggcaattttgtttatacaaaagaagaaatttcagttatgattgatgacattttgatgtataagaaaatagcggttgatggcgtggtttttggctgtattacggattctggattgctagataaaccagccataattgaattattgaaagccacagcaggtctggaagtcacttttcatatggcgtttgatgagttagtagactcggaaaaattgccggcaattgactggttagctgagcaagacgttacaagaattctcacgcatggtggtgacggcgctaaacttcccgaagaaacttttcttcaatggcgaaaatatattgattacgcagcaggtcgaatcattattttaccaggtggaggaattaaatcgcacaatatggaatggattacaa

SEQ ID NO: 3793 - DNA, 6001 bp, Listeria monocytogenes 4b
  misc_feature (1)..(end): n can be any nucleotide: a,g,c or t/u
tgctagctctttcaacatgaaagggagatgcctatgacttttttgttaggaactcctggaaaggataacccatgaccgtttatgaagcactctcttttgcagtcgcttttacaactttaatgttgttaataaacagtcaaaataacacaaaaaaataaccactcataaactttggcgagtttagtggttatttttataccatattagactagctgccaccttaaatggggcttacatttgagggtcatgttcttgcacgactctcttttcatgtttatgataccacatttccattctttatgccaagtattcccaaatgggtttttcatccgatttattcattttcttctattaatagttgcattttccagtactgtatcgcgtacattgtttttgcgtcatgaatgcattgttgtgctattaattgttctgcttcttccagcgttactttgactaaattaataaattcatctgcatcttgcgccaatggatgctccattttccggaggtcacgcgctacataaatatataaaagttcactagcaaacccaggtgatgtataaaaagaagtgagatacgttaaatcatcggactgaaaaccagtttcttcttctagttcccgttttgcggtcacgagcggatcttcccctggctccattttaccagctggaatttcgataatgtttttttcgagtggctttcggaattgctctactaagtacattcttccatctgctgaaaaaggtataattgccacaccaccgggatgcttgacgatttcgcgcttgcccttttccccgtttggtaactccacatcatctacttgcaattcaataatatttccgctaaaaatcttttctgtatgaagcgttttttcctctagtgagtccatttctgccacctacctctcatttttttcattataacataactaagtccgagtttaatttacatcgcacgactgataacatctattttctaaatatggtatgataagaacaaataaaggacaatttctaaaatataaaaaccattcagcttgcctagttttcgcttacaaaatatacttaaatggtaggttaatttccatcaatctttattttagaaaaatttactataagaaaagcggaccttttaaacaggtacttaaaggagaagatgtataatgaccgtttttaaaaagatattagcattcacaggttccattttccttgtcatgcttttggctggtatcctcacttcactaatccatagtggtttggtaattgcagcaattgttatcgctgttgcggctatcctatttttcttttcatctaaagctgggggcccggggcccggggcacatannatggcctgggtttaaccaagaaagaatataaatatattcgcactaacttagaagaggcacgtgtgaaaattatccgccttcaaaaaatcatgactcaaaacaaagcgttatattctttccaagagcgtaacaaaacacttttacttacaaaaagaatttatggcattgtaaaagatgagccaaaacgtttttatgaagcagaagatttctttttctcccatcttgactctttagtggagctaacagaaaaatatgctttcttagaaaaacaacccgtaaaagacaaaaaaatctatcaaacactttctgatacgcgcacacttttaaatgatttaagtcgtgttattgaaaaggatttatttacacttttgaatcaagatgtgaacaaccttgacttcgaactagaagtagcgaaaaactccatttctaaacagaaaaagaaatttgaaaggggtacaaaagatgaccgagaacaagccaagtgaagaaacaaatgaattaaaagatttagtagttgaaaaagaattcaaccaaacgttagatgatctccttgctaacccgtttggatcagatggtgaatcagctgcaagtatcgtaaataatgaaacagatgcagctcctcgccttgtcgatatgcttactgaaacaaataaaaaacaagcattagagttatccaaacaaatcgaacctggaaatcaagcagcgattcttggatacggagctccagcccaagccaaactccacgatttttctcattcaatgttagcacatgtacaaaagcaagatgttggaccaattggcgatattattagcgatttaatgtatcgtttacaagaagcggatcccgatgaacttgccgctcgtaataaaaatgttttcactaaaatgttccaccgagtaaaacaatccatcaacgaaattacttctaaatatcaaaaaattggtacccaaattgaccgcatcgcgttgaaactggaacattccaaaaagcgtttaatggaagataactctttcctagaacagctttatgataaaaataaagattacttccaagcacttaacatctacattgctgctggagaattaaaattagaagaaattaatacaaaaatgctcccagaacttcgcaaaaaagcagaacaaactggcgaccaaatggattaccaagaagtgaatgacttaacgcaatttgctgaccgtctggataaacgagtatatgatttacgtctcagccgtcaaatcactatccaacaagcaccgcaaatccgcttaatccaaaatacaaaccaggcacttgctgaaaaaatccagtcttccattatgactgcgattccactttggaaaaaccaagtagctatcgcacttaccttgctccgtcaacaacaagccgtagcagctcagcgccaagtttctgaaacaacgaacgaacttctaaaacgaaacgccgatatgctaaaaacaaacgctatcgaaacagcgcgtgaaaacgaaagaggtatcgtagacatcgaaacacttaaagaaacgcagtccagcttaattgaaaccttgcaagaaacgcttaaaatccaacaagaaggccgtgctaaacgtgccgtggctgagaaagaacttgtaacaatggaacaagaacttaaagaacgtttactggaaatgaaataatcaaaaaggctagcacctaaatcgtgctagccttttttatagtccttctaaacgtaaattttcaaaataaacgggttttaaattggttacagtaagcccaatcaaacgaatactatcctgaccagtatagctttctcttaaaagaagggccgccgcttgataaatttgacttgcatcattggtatattcgtttaaagtaagccgcttagtaatggttgtaaagtcactgtagcgtagttttagtactaccgtcttaccatgtttttgtagtttaatgagccgttcttctacttttttggcaaattgcatgaggctttgttcgagaactcggctatctaacacattaaattcaaaagtagtttctttaccaacggacttgcgatcacgatgcggattcacaatgttgttagaacgacctcgaacatgtcgatataaatgatagccatgtttgtgtaattcgcgaataaggtcccactcgctccacttcttcaaatctgctcccgtttcaattcctaaacgatgcaatttttctgcggttactttccctaccccataaaatttagtgactggtatttgttctaagaaggcttctgcttcttctggtgtaactaccgtaataccagcaggtttcttaaaatcagaagcgatttttgcgataaatttattaaatgatacgccggcagaagcagttagaccaagctcttggtaaatcgtctgctgaatctcgcgtgcaaccattgtggcggatttcattccttttttgttttcagttacatccagataagcttcatctaaagagagcggttcgataatatccgtatatctggaaaagatctcgcggatttgattagaaacctctacataatgagccatattgccgtgaataaaaataccgttcggacaaagtttagcagcttgcctggtgggcatagctgaatgcacaccgaatttgcgcgcttcataagaacaagtcgcaacaactccgcgtttattagggtctccaccaataataagtggcttccctcgaaactcaggatggtcgcgttgttccacagatgcataaaaagcgtccatatcaatatgaataatttttctactcgtatccataactgcatctcctccgaaacgaacaaacgttcttattcaattataaaggttatcctcattaattacaagaaaaaaataccctattttcataagatattttcttctgttttatttctttaaaaatgcacctttaccgaagaattcgataacttgtggcattacttgataaagtcgtgttgcaatgttcattacaaaaggtaaattgatttcgcgacgcttagttcccataatttgtactgttttacgcgcaaccttttctggctttaacactaatttgccaactgtttctaaatagtttcctgatttatccgctacatcgaaaaagtttgtggcaatcgggccaggattaatcgttgtaacatggattttatctggcattagttctaaacgaagtgcattagaaaagcctaaaaccgcatatttcgtggctgaataaacggttgatttaggtgtagcgattttagcggcttgggaagcaatattaataatatgtccagctttgcgcgcttgcatttgcggtaaaatcagttgtgtgagttgaattaagccaagtacattcgtatcaaacattttttcaattgtctcaaatggaatatctaccgcattttcaaataaaccaaaacctgcacagttgactaacacatcaatttgataggatgcatttatctctgcgctgacttgtttcacttgctcaaaatcagtcatatctaaagtaaaataagtcgcttctactgaaaaattatcatgtatatctttttgtaattctattaattttttcgtacttctggctgttataataacattaccaccggacatagcaacttgtcttgcgatttcagctccaagaccgttagaagctccggtaattaaaaccgttttattcttcaaaaaagggttcattttgtcactctccaattggaaaaacagctaagtcataagctatttcagtattttcaaaaatagtttttgcttctattaatagttctttacttgcatctcgatcatatcttgagctgatatgggttaaaattaattttttgacattggcggttttagcaagattggctgcttgaagcgttgtagaatgcatgtattctcctgccatttttgctttatcgccttcaaacgttgcttcatgaaccaaaatatcggcattcagtgctagttctagttcgttagcagtttcttttgtatcaccaaaaatactaataatcttccctttttgcggctctccgatataatttttaccatcaatgacgcgtccatcagctaatgttacgatttcgccgtttttcagcttttgaaaaaccggtcccgcttcgacgccgtccgcttttaatttttcagcattgagtgcaccttgtttatctttttcgacaatacggtaaccaaagctacgtacgccatgatcaagatcgtcagctgtaactaaaaacatttcatcttcaaaaatcaaacctggctctatttcttcaaaattaattttatatgtaagccttgttccactgagtcttaaggaagtttcgacatattctgctattccggcaggaccgtaaatagtcaaattagagtcccctccttgaaaagaacgactacttaataagcctggcagtccaaaaatgtgatctccgtgcatgtgagtaataaagattttttctagtttactaagtttaatttggcttcgcatgatttggtgttgtgttgcctctccgcaatcaaatagccaaattgtatttcgttcatttaacattgaaagtgcgatggatgtgacattacggcctcgcgacggtacgcctgctccagttcctagaaaaacaagttccataatctgtttcattcccttcccagttcgtgtcttattttatcatattcttaaacgaacag

SEQ ID NO: 3794 - DNA, 5543 bp, Listeria monocytogenes 4b
  misc_feature (1)..(end): n can be any nucleotide: a,g,c or t/u
aaatattaaacttgatcaagatgaccgtgtgtcacctgcaaaagacagtaacttaaaagaaaaaatgactgtagaagttacatatgtcaattcaaaagcagaaaagaaaaatgaacaagttaaattcgaaacagtatataaagaagatgatagcctaaacaaaggcgttgaaaaagtcgttcaagaaggtaaaaacggcgaaaaagttgttgagtataaagtaacatttgaaaatggcaaagagaaaaaacgtgatgtcattaaagaaaatgtcacttctaaaaaaactgataaagtagttgtacgtggcacgaaagaaaaagtggtagcaacaccagtttctaacgtatctactccaagtacaacgtcatcatcatcatcaactccatcaggtggtaaaacatacagaatggaatctactgcatattcaggtggcggtactacagcttatggtatcaacctaagtgccaaccctggactaaaagtaattgcggttgatccacgaattattccacttggctctaaagtttgggttgagggatacggagaagcaatcgctggagatactggcggcgctatcaaaggaaatatcgttgacgtgtatttcccaaatgaaagtcagtgctattcatggggtagaagaatggtgactgtcaaagtgttaaactaaattcgtataaaaacgaggctgactcatagggcctcgttttttctttgtccaaaatgtggtatgatatatttacttattttataaaaaaggatgtagtaattatgaacgggaagcctgtaatacatgaatttatagtcgtagaaggacgggacgatacaacggcaattaatcgttcagttattgctgataccattgagactaatggatctgccctttcacaagaaacaatagaaaagattagacatgcacaagaacttcgcggcgttattatttttacagatccagattttcccggtgaaaaaatccgaaaacaaattgactcagcggtacctggctgtaaacacgcttttatcaatcgccaagacgctttgccaaaagcaggtcgtggccttggagtggaacatgccagtagcgctaatattcgggaagcactcgaaaacttccatacaagtgggacgcctgcagaaaaacaatttatctccaaagatattcttattcatctcggtcttcttggaggagcgggagcgaaagaacgccgagaaaaaatcggtaatatactaaaaattggctatacaaacggaaaacaactgcaaaccagactagaatcatttgcaatcagtgaagaccagttagtagccgcgtgccaaaagattatgcaggaggaagaaaatgagtaaagatattgcaactcccggaagaacgacagaaatcctaaagaagtatggtttcttatttaaaaaaagtctgggtcaaaactttttaatcgacagtaacattttgacacggattacagatacagccgaaataacaaaagaaacaaatgtcatcgaaatcggaccaggtatcggcgcgctaacagaacaattagcaaaaacggcgaacgaagtagttgcttttgaaattgatcaacgtttactgccaattcttgacgatacgctaagtgcatacaataatatccaagtggtccacggagacgtgctaaaagcagatgtggaggaagttatcgcagagcaattcgcgaagccagatctaccactgaaaatcgtagccaaccttccgtattacgtaactacaccgattattttaaaattactccatgacaatattccggcagattcgatgacgtttatgctccaaaaggaagttgcggaccggataagcgcagttccaagcacgaaaagctacggaagcctaacaatcgctatccaattttacatggaagcagaactagcctttatcgtgccaaaaactgtcttcatgccgcaaccgaatgttgattccgcagtaattcatctgaagcgtcgcaaagaaccattagctgaagtaaacgacgaagaatttttctttgaagtaacaagagcttcgtttgctcagagaagaaaaacgctttggaataatttagcttcaaaattcccggctttaaaaccacgcaaagacgagttggtagaaggtctaaatgctattgggatagacttaatccgtcgtggagaaacgttggatattccggaatttgctaaattaagcaactttttaggtgattttttaaaggaaaaataattttttttaaaaaaagcgctttcttagttgacagttagcccttccaactgttaaaatatttggttattgatttcggagccgaactatgctataatggatattagtgaggtggaaaataaatgccaaaaaccattgcaagcattaagacgaatttagattctagattaggtaaagcattgacattgaaagcaaacggtggtcgtaagaaaacgattgaacgttgcggtatcctagctgaaacatatccatccgttttcattgtggagcttgatcaagatgaaaacaactttgaaagagtatcctatagttacacggatatcttaacagacgcagtagaacttgtatttacagatgataataaagaattagctttataataaagctgaagtagccgaaccatatagcgtggttcggtttttgctatacatagaagttgttttgggccgctagctacatattttttctttcatatgatagaatagaaaaagagattttgaacgcggaggccaagaaaaatgaaaataagcattacagcaccagctaaaattaatctttcacttgatgcgctgtacaaacgtgaggacggctatcatgaagtggaaatggtgatgacaacaatcgaccttgctgatagattatacttagaacgcttagacgaagacaaaattgtgctggatgtaaaagcacactttattccagaagatcgtcgcaatttaatttatcaagcagccctccttttaaagaagcgttttgacgtaaagatgggtgtgcgcattacaattgataagcacattcctgtttctgcgggtcttgctggtggtagttcagatgcagctgcagcgctcaaaggattaaatgtcatttgggaacttggtctttcaatagaagaattagccgaaattagttcggaaattggttctgatatcgctttttgcgtatacggcggaacagcgctagcaactgggcgcggggaaaagatttctgcgttacctaatattcctggttgttggattgtgcttgctaaaccgagcattagcgtgtctaccccgactatctataaagaacttcaagtagataacgtagaacacccagacacacaaaaaatgattgaatccattaaaaatggcgatttagacgggatatttgcgtctacaggaaatgtattagagtctgtgacattagaaaaaaatccgcaagttaaacgaataaaagatcggatgttagcgtttggtgctgaggcggccctaatgagtggtagcggtccgacagtgtttgcgcttatcaaacagtactccagagcaaaacgtgtctataacggcttgcgtggcttttgtgaggaagtttatatggttagaccatggagtgaaggcgagaacgatacaaatataaataattaatgaatgagaggggtcaaagaaatgaaaattatttttaatgcagatgattttggaattagcccgggagcagtttatggtattttagagtcttataagcgaggcgttgtgaaatctaccacgcttcttgctaatagcccggcatttgatttggcagttgaagttgcgaaagaaaacccaggtctcgatattggtgcgcatttgaccctgacgttcggttctccagtccttcaaggtttagaaacgctaacggatgatgatgggcgtttccgcagaaattatacctcacttgaaaacggcttagctgatgtagatatgaatgaggtggagcgcgagttaactgcacaaatcgagaaaattttagatgcaggaatcactatttctcattttgatacacatcattcaattgagccgctaatttatcccgtacaacataaacttgcggaaaaatacggtgtgagcattcgacgtcattctgatgtttcggacttcggtgctataaaaactcctgacttattcgctacggagttttatgcagacggtgtatcttttgaaacgattaaaaaattagtacaaaagcatatcggaacgaatgatgtagtcgaagtgatgactcatccggcatttattgatgaaacgttgcgcgaaatatctagttacgtagagccgcgcatcaaagaagtttcaattctaacttcaagagaactacaagcatatttaggccaacaagaagtagagattattagtttccgcgatttataagagcatgggcctgtcaaaggatgtttatttggcaggcttttcgttaggttaaaataataaatgttgtcaattttatagaaaacgttttataatagagaaaatacggacaaaatacgtgaaatagctttttaatatacggaattttatcaaagggagagagattatgaagattcgtcgcagtgaacgattaattgatatgacgcagtttctattatcgcatccgcgaaagttagtgccgcttacgatgtttgctgaacgttatggctcagctaagtcttctattagtgaagatttggttatcataaagaaaacatttgaagacagagggattggtacgctcgaaactgttccgggtgctgctggtggtgtgcaatatatttcgatagcgggaaatgacgatgtgctggattttgtgcatacgctatgtaatagaattgcggagccaaaccgtttgcttccagggggctatttgtacttatctgatttacttggagaaccagtaacgctcaaagcaattggtaaaattttagcaacgaaattcaataaccaaaaaatagatgcgattatgactgttgcgactaaagggattccgattgcacaagcggttgctgaacatttaagtgtcccctttgttatcgtacgtcgtgatagcaaagtgacagaaggctcaactgtaagcattaactatgtttcaggttcatccaaacgaatcgaaaaaatggaattatccaaacgaagcttagctgaaggctctaatgtagtaattgtggatgactttatgaaagctggaggaacaattaatggtatgaaaaatctgctagaagaattcaacgcgcatttagttggaattggcgtgttagttgaatccgaatatgcggaagagcgcttagtggatgattacgtatctcttgtaaaaataaaaaatgtgaacatgaaagaaaaacaaatcgaagttgttgatgggaattactttaatagttgattctaaaccctggaaaatattctggggtttttctttttttggggggcgaattgctactaaaaacaaatcagtcttccgatgtacttcactcagttaacttttatggtagaatgaattctatcgttactacataaaattcaaggcttctagactttaggagcagaaggagaacattcat

SEQ ID NO: 3795 - DNA, 5349 bp, Listeria monocytogenes 4b
  misc_feature (1)..(end): n can be any nucleotide: a,g,c or t/u
tggatcggtagtcagtctcaaggctagggctgttcgccatcatacgagcacgcgagatgggttcacaacgttgttagacagttcgggtccctatccgtcgcgggcgcaggaaattgagaggagctgtccttagtacgagaggaccgggatggacacaccgctggtgtaccagttgttccgccaggagcatcgctgggtagctatgtgtggcagggataaacgctgaaagcatctaagcgtgaagcccccctcaagatgagatttcccatttcttcggaaagtaagatccctgaaagatgatcaggtagataggtttggagtggaagtgtagcgatacatggagcggacaaatactaatcgatcgaggacttaaccaaaaaatgaaacgaagttacctaactgaaccctttcttctctagttttgagagagcaatctttcaacaactttatattgtctggtagttatggcgagaaggtcacacccgttcccatcccgaacacggtagttaagcttctctgcgccaatggtagttgggggcttccccctgcgagagtaggtcgctgccgggcaatttgaaaagtcctaattatttagggctttttttgtttgtaaaagataaataaattgctaataggtagggatatctagtataattaaagtcaaaaatagtcaaagtcaatgatttgcaaaaaacagaaaggagattccttataatgaaaaacatttctgatgttatagaagcttatttgaaacaagtattggaatcaagtgaagcagtggaaattaaaagaagtgaaattgcagataagtttgaatgtgtaccttcacaaattaattatgtaataaacactagatttacaatggaacgagggtatatcgttgaaagtaaacgtggtggtggtggctatattaggattattaaagtgaaaatgaatgataaacttcaattgttagaagcaatcatttcaatggttcatgataaaaaggtctctcaatcattttctgaagatgtctattttgagattgcttgaagaagaagtaataacgaagaaagaagcaagattaatggtggcggcattggacagggaagttttaattttaccattacccgatagagatattttgagaagtaggattttagaggcgatgttagttgctttgaaatatgattaaggtgtgatgacgatgatttgtcaaagatgtggagaaaataaagcagttattgccttgcaacaattaaatgagcttgggaaagtggagtcattgtacctatgtgagaattgtgctacggacgaagctctctcttcggaaaaagatttggttaaagcgatggatacttttagtgaggttgctcttgacttcttaacgcttttgcaaaaagaagaaaatgcgcagaaagaggttgtttgtgagaattgccatcttagttttgaagagtttttaaagactaatcgagttgggtgcccggagtgttattcggcttttgaggcacagttagtaccgattattggtcgagtgcaaaatggatataaaaaacatgttggtaaggttcctgcagaagttgaacgtgcggaaggtgttcaaaatgaaattagtcgcttacaagaaaagctagcacagctagttgaaaatgaggagtttgaggaagctgctgttgtccgtgatgaaatcaaggctttgaaagctggaggtgaggataaatgaatgtatttgaaccgcggctgagttcttggttagaaaatgctggtgatgacgatgatgttgttttaagctcacgtattaggcttgctaggaatttgaaggatgaacagtttccagtttatgagcagaaggaagagattgttgataatattgccgaagtttttgatgataattttactttgattaaaatgaatcaaatttctttgttacaaaaggcgcttttggtggaaaaacatttaattagtccttatatgatgaataaaagtgaatatggtgcggttcttttaaatgaggaagaaaatgtgagtattatgttgaatgaggaagatcatttgcggatacagtgcatgacgccgggtttgagattatttgatgcgttagaggcagcgttgcaaattgatggttatgtggaagagaagcttagttatgcttttgataaagagtttggatatttgacgagttgtgtgactaatatcgggactggtatgcgcgcttcagtaatggtgcatttaccgggactcgtgacaacaaaaaggattaaaagtgtgattgaagcgattaggagcctaggttttgtggtaagaggtatatacggagaaggtagcatgcctgcaagtaatattttccaggtctcaaatcaagtaactctcggtaaaacggaaacagaaattgtggaagatttaacgcaagtcatggaacaaattatcatgcaagagcgtgttgctagaactacattaaagcaaaaatttcatattgcacttgaggatagagtttttagatcatatggtttattgatgaattgtcgaattatttctatgaaagaagcttcagatgctatatcggatatacggcttggtgtagaattaggatttttcgagcatatttctcgccaaaaaatgaatgaattggtactattctcgcaaccagcttttttgagaagagaagcaggacgagatatggatgaattagaagagaaagtaatacgggccaaagtgattcgcgagattttgggcgataaatgatgaggcttacgataaggaggaaacaacaatgatgtttggacgatttacgcaaagagctcagaaagtactcgcgttgtcacaagaagaggcgatgcgtttgaatcatagtaatttaggaacagaacatattttattagggcttgtaagagaaggcgaaggaattgcggcaaaagctctctatgaactgggaattagttctgaaaaagtgcagcaagaggtagaaggattaattggtcatggggaaaaagctgtgacgacgatccaatatacacctcgtgcgaaaaaagtaattgaactgtccatggatgaggctcgtaaattagggcatacttatgttggaacagaacatatcttactggggcttattcgtgaaggcgaaggagttgcggctcgagttttaagtaatcttggtattagtttgaataaagctcgtcagcaagttttacagctcttaggcggcggggatgctactggggcaggaagacaaacaaatacacaggctacaccgactttagatagtttggcacgtgatttaacagttattgctcgggaagataatttggatccggttattggccgttctaaagaaatccaacgtgtgattgaagtgcttagtcgtcgtacgaagaataacccagtacttattggagaacctggtgttggtaaaacagcgattgcagaaggactagcgcaacaaattgttcgtaatgaagtgcctgagactttacgtggaaaacgtgtaatgacactggatatggggactgttgtggcagggacaaaatatcgtggtgaatttgaagaccgtttgaaaaaagtaatggatgagattcgtcaagccggcaatgttattctatttattgatgaattgcataccttaattggtgctggtggagcggaaggtgcgattgatgcctcgaatatcttgaagccgcctctagctcgtggtgagttgcaatgtattggtgcaacaacactggatgagtaccgtaaatatattgaaaaagatgctgcacttgagagacgtttccaaccgattaaagtagatgagccaactgtagaagaatccattcaaattttacatgggttgcgtgatcgttatgaggcgcatcaccgtgttgcgattactgatgaagcgcttgaggctgctgttcgtctatctgatcggtacatttcagaccgtttcttaccggataaagcgattgatgttattgatgaatctggttctaaagtacgtttgaaatcttttacaacgccaaaaaatgtaaaagaaatggaaaacaatttatccgatttgaaaaaagaaaaagatgcggctgttcaagggcaagaatttgaaaaagcagcgtcattacgcgataaagaacaaaaacttaaaaaatcattagaagaaacaaaagcgaattggcaagaaaagcaagggcttgaccatagtgaagtaacagaagagattgttgctgaagttgttgcaagttggactgggattccagttgcaaaacttgcggaaacagagacaaataaacttttaaatatggagaaacttttacatgaacgcgtgattgggcaagatgctgcggtgaaagctgtttcgctagctgtacgtagagctcgtgctggacttaaagatcctaagcgtccaattggttcctttattttccttggacctactggtgttgggaaaacagaacttgctcgcgcgcttgctgagtctatgtttggcgatgaggattcgatgattcgaattgacatgtctgagtacatggagaaattctcgactgctcgtttagttggggctcctccaggttatgtaggctatgaagaaggtgggcaactgacagaaaaagttcgtcaaaaaccttattcagtagttcttttagatgaaattgaaaaagcgcatccggatgtatttaatatgttgctacaagtgcttgacgatggtcgtttgactgattctaaaggacgggtggttgattttagaaatacggtcatcattatgacttccaatattggggctcaagaaatgaaacaagataaatcaatgggctttaatgttattgatccgcttaaagaccataaagctatggagcaccgtgttttacaagatttaaaacaggcgttccggccagagtttatcaaccgaattgatgaaacaattgtattccattcgctacaagaaaaagaattgaaacaaattgttactttgctgactgctcaattaacaaaacgattagccgaacgcgatattcatgtgaaattaactgaaggtgcgaaatccaaaattgctaaagacggatacgatccagaatacggagcccgtcctttgaaacgagctattcaaaaagaagtggaagatatgctttctgaagaattacttcgtggtaacattaaagtaggcgattacgtggaaattggtgtaaaagatggcaagttagaggttagaaaaaaagacgcaccaaaaaagaaaacaaccgcaaaaaaagtaaaaactaaataacaaacacgcctcccttaatcaattttgaagggaggttttttatggaaaaatcaggattcgtgtcaaaaaaacgaatttgatgaaaaggattaacgcgaacagatgatctgtggtaaaatggagcatatgtatgg

SEQ ID NO: 3796 - DNA, 5859 bp, Listeria monocytogenes 4b
  misc_feature (1)..(end): n can be any nucleotide: a,g,c or t/u
gaagatactggtgttggccttgcaactgttatgttcggaccgctcgttgtcagtgtacttggtgtgattgtcttacttttccaagcgttactacttgcacacggcggtattacaactcttggctgcaaacgcaatgtcgatggcggctatcggaccaatggctaggttaaggtcgaatacaaagctgcccgnaaattattctgcaacaaaagagctacgattttcttattttctatcacagttgtcttagcatcctacttaactaccaccgtgcagcgcggacgcgttgtcccagatccagcatccggcatgatggcatctattctgaagttcatggcgattttctgtgtgacacaagctccaattgcgattgccgaaggattgctaacggtcgtcatgtccattcttatcagcccacattgaccagaaaaggtggcacaattacgatgaaaaaaataaatatcaatgtcattttaattctatgagtagtaatgttaatggttagtccattcttcggcaataaaacgggagaatacggcggctcggacggggaagcagaggcggagatcaccaaaatcgatccaagctatgaaccgtggtttgaacctctttatgaaccaaaaagtggtgaaattgaaagcttattatttacgcttcaaggttgtatcggaacaggaattatcgcgtatgtcattggtgtaagtcgtggcaagcggaaagctgagaacgatgttaaccattgataaatatgcttatcaaaaccggtggatagctttttcgccatcattaaaagcattattttatgtcgcgattctaatactcgcgttaactggtcctgtgctcatccaagcaatactgttcttctgcatggtaccattgacgctctatgtcgttaaaattcactttaaacaatatttgaaatggctccttttaccattttcatttctactttttagtttactttcgattctcatttcgatttctaaagatccaagcagttttctcgcttcgatttcgattggaggtttttatcttggtatttctgacgtgacgataacgacggcaacacaagtctttttccggagtatcgcttgcttagccgcaacctactttttcgtcttgaccgttcccgtggtacaattaacaaaagtgatgaagcgaatttttattccaaaagtactgattgaactgaccattttgatttaccgttttatctttattttcttagaggaagcggcggcaattcgaaaagcgcagagcctgcgttttggttatcacggcataaaaaatagttatcgttcatttggcatgctcgtaaatactttatttaatcgtgttatgaaaagatataatgaaatggttataacacttgatgtgaagctatatcaaggagaatttcatatctaggaggaagccaatttgcttaaaacagaacatatttcattccaatacgaagatggcaaacaagccttaacggatgtttcaattgatttagaaaaaggcaatattatcggacttattggtgcgaatggctccggtaaatcgacactttttatgcagttacttggaattaacaaaccgagcgatggcaccgtttattttgaaggaaaaccactcgcgtatacgaaaaaagcattatttgctttacgaaaaaaagtaagcatcgttttccaagatcccgaccaacaaattttttattcgaatgttcgtgatgatgtagcctttgcacttagaaacctaggtgttagcgaaacggaagtagaggcacgagtgacgaaagtattagacattgttggggcaaaggactttcagcataaacctgtccagtatttaagctacggtcaaaaaaaacgtgtcgcaattgcgggtgcccttgttcttgatacagattggttacttttagatgaaccaactgctggtcttgatccgattggcaaaaaaatcatgatggaaatcatcgaacgtcttgcaagccaaggaaagaaaatacttatttccagtcatgatatcgatttaatttatgaaatttgtgattatgtctatatgctgaaggacggaagcgttttgacagacggggaaacgagcaacgttttcttagagaaaagtaatgtcgaacaagcgggattagtacaaccttggctcatcaaattacatcaacaagctggctatccactgttcaaaaaagaagccgattttttcgcgcatacggggaaggtgactaattaatggtaaagcaaataatgattcaaggtaccgcttctgatgccgggaaaagtgtactggttgcaggcctatgccgcctattcaaaaataaaggaaagcgagttgttccatttaaatctcaaaatatgtcactcaattctttcataacggcgacaggagatgaaatgggacgcgcacaagtttttcaagcagaagcagctggtgtttttccagatgtccggatgaatcccgtgttacttaaaccgaccaatgacaggcagtcgcaagtgatttttatgggtgcaattttagataatatggatgctgtgacgtaccacgatttcaaacaaacccttatcccgaaaatccaggcagtttaccagagtttagcagatgaaaatgatattattgtactagaaggtgctggaagcccagccgaaatcaacttaaacgaccgagatatcgtgaatatgggcatggcaaaaatggtcgatgccccagttgtcttagttgctgatattgacaaaggtggcgtttttgcttcgatatacggcaccattatgctgttaaatgaagaagagcgggctcgaatcaaaggtgttattatcaataaattccgtggcgatgtagctcttttacaacccggaattgatatgattgaggaactcacaaacgtcccggttatcggtgtgattccttatgccaatctacaactggaagaagaggacagcgtttctctaagtgggaaaaattacgtgccggatagtaacgcactacttgatatcgcgattatttgtttaccgaggatttctaatttcacagattttcatattctggaaatccagcccgacataagtgtacgctacatccgtaatatagctgattttggaaacccagatttagtcattattcctggaagtaaaaatacactagaagatatggctttcctcgaagaatctggacttaaaaatgccattcaaaactatgctaaaaatgccggaaaagtaatcgggatttgtggtggctaccaaatgctcggtaaaaaaatgctcgatccgaatcaagtggagagtaaacaattagaaatagccggacttggtttgctagataccgagaccatttttctcgaccaaaaacgcactactcaaattacaggtgtgacgcattcaggtgaagcagttgaaggttacgaaatccatatgggtgagacgaagcgaggcgagagcactagtccattttgcgaaattaaagcggtgaacggaaacgaagaaacccaccaagatggcgctatctctgtcaacaaaaatatcatcggcacatatattcatggtattttcgacaatgatgttttcttaggaaatctatttgacgaactactaacaggtaaaaacaaatccgtttatccgcatgaaatcattaatctgaaagaacacaaagaacaagaatacgacaaactagcggcccttttagaagcaaatattcaaatggaccaactagaaaaaatcatgaaaggagaaaaaatatgcgtatctacacaaaaaccggcgataaaggaatgacaagaattatcgggggtagcaaagtaagtaaagataatatccgtatcgatgcatatggaactttggatgaacttaattcgctgattggctacacgataacaacacttggggctgaaccagaaattcaagccgaactcgaacaaattcaacagcaattatttgatgcaggaggggatcttgcaaccgaagaaggcaagcgtgcgtataaattaacaagtgagcctgttgcgtggctagaagaccgaattgacatctacgccgatgaacccccagaaatagaaaaatttatcctaccaggtggaacgcaagcagcctcattactgcacatggctagaaccgtaacaagaagagctgaacgcgaaatcgtcggtatgttaaaaattgcttcaagtaacgaagaagtattaaaatacgtcaaccgtttatcggattacttttttgccgttgccagagtcgtcaattaccgcgctggtgaaacagacattttttacaaaaattccgaactcgttttccgcaataaaaagaaataataaaaaacctctccagacatcaaagccggagaggttttccttttttaaaaacgttgaattaaaaatacaccaacaagcattaataaaacaccaatcatacgataacggttaattggatgaggaataaccccgaaaaaaccaaaatgatcaataataagtgcaataatcatttgcccacaaagcgctaaaacaaccgtcattgctgagccgagtaatggtaaaagtaaaatgttagaagttacgaagagcactccaagcgcaccgccagtgaaaacccaccaaggaattcggccgacacctttcagttgaaaagtcaaacgacgctcgacaattaaacaaacaagcgtaagtaacgttgtcccaactaaaaaggaaataaatgatgccacaaaaggagaaccgacagtgagccgaagttggctattaatcgacgtttgaatcggggaaagtagtccagaaacaagtcccattgccataaatagtaataatgatttggatgatctttttgtcatgttttctcctccttttaaaagcgttgcatcaagtaaatgccgccgaacattaagataacgccaagtagacgttcgatattaatctcatgcattggtacttgaaataaaccaaagttatcaataataatcgccataatcatttgtccacaaaccgtaatcatcacaagaagtgccgaaccaagtcgaggtaaaagtaaaatattggccgttaagaaaataacgcctaatgttccaccaccaacccagatataccaaggatttgaggcaatcatttctgaagatattggccatgatttttgtgtaaataaacaaacgataagtaaaacagttgtccctaccataaaagaaacccacgaagctaaaaacggtgatttcgtatatgtactaagtcgcgtattgatggccgtttgaactggtaataccatcccagctaacaaacctgatacaataaataatataatcaaaaatttccctcccttttatcacaatgagataattataaaataaaagcggggtaaaaagatagtaattaatttaaagcgaggtttttttatgaaaattcgtattatcggatccgtcggaagcggcaaaacaactctagcaaaaaagctttccgagtggcaacaaatcgattattttgaaacagatcgcattgtctggaaacgagaagaaacagaggtaagacgaaccgacaatgaaaaaatagctgtattaaataagattcttcaacaagaaaactggattattgaaggcgttcatttggaagcatgggtggacgagagcattaaccaagcggacgtggttatttttcttgatttacctaaaaaacaaatccgctcccaaattattaagcgccaaattaaacaattaatacgattagaagcagctcattacccaattcggttcaacatgttaaagaaaatgttttattgggacgatttatttgaccaacgaacaaaaccactaattgctagaaaaatggccccaaatccaacanattggctaattatcaaagaaaaaacggtatttcaagaaataaaaaatggggtattgcaa

SEQ ID NO: 3797 - DNA, 4604 bp, Listeria monocytogenes 4b
  misc_feature (1)..(end): n can be any nucleotide: a,g,c or t/u
tagtggccaacagtgtgctggaaaatcgaaaaaattattgcatgatcttggcattgaagtagctggtcatgtacttgaaattggtggcactcgtgcgaacttaacacgtgattacgcggttagagaaatccaagaaacatccgaagcttctccagtgcgttgtttagacggcgtagcggcagaagaaatgatgcaaaaaattgatgatgcgaagaaaaatggcgacaccattggcggtatcgtagaagttgtagttggtggtgtcccagctggacttggtagctacgtacagtgggacaaaaaactagatgcaaaaattgcgcgtgcgattgtaagtattaatgcatttaaaggcgctgaattcggtgtcggttttgaagctgctagaaaacctggtagtgaagtgatggatgaaattttatggagtaaagaagatggctacacgagacgtacaaataaccttggtggattcgaaggcggaatgaccaatggtatgccaattgttgttcgtggcgtaatgaagccaattccaacattatacaaaccacttcaaagtgtggatattgattcaaaagaaacgtttaatgcaagtgtagaacgttcggatagttgtgcagtacctgctgcaagtgtggtagctgaagctgttgtcgcttgggaagttgcagttgctgtgttagaaaaatttgatggtgatcgttttgacacacttaaaaaacatgtggaggaacaccgaaacttaacgaaggagttttaaacatgccagaaattacagtccgtgctaaaagtaaaacatacccagtatatattaatgaattcgcattagaagatgtccgggaaaagtggacggagagcctagctaaattttcccacgtgtttgttttgacggacgagcatgtggcggaacttcataaagcaaagcttgacgcggttctcgctgatttacctgtagtcacttattatgtggcgccaaatggggaagaagcgaaaacgtttcgtgtatatgaagatgtgatgacaaaattgattgaaacaggtcttgatcgtaaagcggttttaattgcttttggtggaggcgttattggtgatttaggtggttttgttgcggctacgtatatgaggggcattcctttttatcaggtgcctacgacggttcttgcgcatgatagtgccgtgggtggcaaggttgcgatcaatcatccgcttggcaaaaacatgattgggaacttttaccagccagaagcagtcatttatgatacccagttctttgctaccttgccagaacgggaaatgcgctctggttttgcggaaatgattaaacatgcgcttattagcgatcagacgttactacgggccttaatggatacatttacggagccgaaagacttttatacgaaggatttgacgccgtttttacaacgtgggattgaaattaaagcaaatatcgttgcgcaagatgaaaccgagcaaggcgtgcgcgcttatttgaattttggtcacacatttggtcatgcacttgaagcctacggaaactttggcaagtggctgcacggcgaggcgattacttatgggatgatttatgcactcacgatgagtgagacaatttacggactggatttcgatttagcagaatttaaaacgtggctaaaacagttaggctatgatacgacatttgatgcaactgttccatttaataaaatactggaaaatatgcgtcatgataaaaaaacaacttttaatgaaataagtatggttttactcgaagaaattggaaaaccggttatttttaaagcggaagatgatttgatttttgaaacttacaaacgtgtgatgcgaaatggagggaatggcatttgagagcaattcgaggggcaacgacaatagaaactaactcaccggaagcaatttatgcagcgacgaaagaattatttgaagaaattttaacgcaaaatgaaataacagatagtgagcaactaacatccgtcatcattacagtgacagaagatatttttgccgcttttccagctaaggcggtgcgtgaaacacctggctttgaatatgttcctgtcatggggatgcaagaaattccggtgccaaattcgcttccaatgtgcattcgtttcatggtattcacagatctacataaaccactcgaagccatcaaccatgtctacttacgaggagcaaaagtactgcgcccagatttagtaaaagaggaggatgcgtaatgaaatggaaaaaatcacttacaggtctatcttcttataaacctggaaaacgcgaagaagaagtgatggcagaacttggtttaacgaaaatcaccaaactatcatctaacgaaaacccactgggaacttctccaaaagtggcggagcttcaagccgattctagtgtggaaacagaaatttatccagatggctgggcttctagcttgcgtacagtggtcgctgatttctaccaactggaagaagaggaactgatttttacagctggtgtggatgaactgattgaactgttgacgcgggttttactggatacgacaaaaaatacagtgatggcgacaccgacatttgtgcagtatcgtcaaaatgcgttaatcgaaggcgccgaagtaagagaaattccgctacttgtggatggtgcgcatgatttagatggtatgttgaatgcgattgatgacaatacgacgattgtttgggtttgcaatccgaataacccaactgggaattacattgatttagcagatattcaagcgtttttagataaagtaccaagtgatgtacttgttgttttagatgaagcatatattgaatatgtgacgccacagcctgaaaaacatgaaaaactaattcgcacttataaaaatttaattattacccggacttttagtaaaatttatggtttggcaagcgctcgtgttggttatggtattgcggataaagcaatcattgagcaactaaatatcgttcgtccgccgtttaatacaacgagcatcggtcaaaaattagcaatagaagcaataaaggatcaagcttttattgaagcatgccgaacttctaatgcaaatggaattaaacaatacgaagcgtttgcgaaacgttttgagcaagtaaaactgtatccagcgaatggcaactttgttttaatagatttaggaattgaagcaggaactatttttagctacttggaaaaaaatggctatattacgcgttctggcgcggcgcttggttttccaactgctgttcgaattacgatcggaaaagaagaggaaaatagtgcggtaattgcacttttagaaaaattattgtaagtgtttggaggcgtttttgaatgaaagggacggtagttattgttgggcttgggttaattggcggttctattgcccttgcgattaaagccaaacacccagaagcacatatcatcggaattgacgtttcctatcattcgttagaagttggaaagtctctcggtgtgattgacgaaattggcgaaagtattttaatagatgggccaaaagcagatttacttgttttttgttgtccggtaaaagaaacagaacagttattaacgcgtttaccagggctgcgtttaaaggaaaatgtgatcgttacagatacaggtagtacaaaaggaaccatcatggaagcatccacggcacttagagaaagtggtattacgtttattggcggtcatccaatggctggttcgcataaaagtggtgtccgtgctgctaaagaactgttgtttgaaaatgcctattatttgttaacaccaacgaaagatgtagcagaagacaaagtggctgaacttaggacgtggctgtctggtacgaatgctaagttcttagtgttatcaccaaatgagcatgatgaaattactggcatgttgagccacttaccgcatattgtggcggcggctttagtgaaccagacgcaaagctttacagaagaacatcctgcagcatttcgacttgcggcaggcggatttcgtgatattacacgggtcgcttcttctgatccaagaatgtggacggatatttctattagcaaccaaaaaacgttaacgaaacagctgacgatttggcgagacagtatgaacgaagcgcttgagatgcttgaaagtgaagacgcgagttctatatatgccttttttgatggggcaaaagaatttcgagattcacttccagttcatcaaggtggtgcgattccatctttttacgatttatttgtcgatgtaccagattatccaggggtaatttctgaagtgactaggtatctgggcgaagaagaaatcagtttaacaaacatcaagattttggaaacacgggaagatattttcggtgtgttacaaattactttccaatcggatgaagacagggaccgggcgaaacgttgcattgaaacaagaagtaactatacatgccattacgaataggagagaaatgacgatgaaattaattacaaataaacaagggctggttggcgcaatcacagtccctggagataaatcaatgtcccatcgcagcattatgttcggggctattgcagaaggaaaaacggtcattcgtcatttcttacgtgcagatgattgccttggaacattaa

SEQ ID NO: 3798 - DNA, 5149 bp, Listeria monocytogenes 4b
  misc_feature (1)..(end): n can be any nucleotide: a,g,c or t/u
ctaaaggagatattgcgcttcaaggtagctttcttacaacgattgctaaagctgcacaaggggacgttgagtatatactcgaaaatgatacttcctcggcctcagatttagaagcaccaaatggcgatattcgaattcaaattccgccaacatggaatgtcgatggaacacttggaactaaaaaagaaaaaatctattttgacttaaaaaatgcaaaaatttgggatgacgcagaaagaacttttgtcttcactcaaaacgcagaagaaataagcatggcgacacttcaagcaaaagtaggaaatggaattattaaagtttctgaactggaaacaaagaacgtttaataaaatgaaaggaagggaaaacaatgaaaaagttatataaatcttcttcacaaaaaatgattgctggtgtctgtggtggacttgcagaatactttggcattgaagtaaccatcattcgtttactttgggctggagcagttctattctttggtactgggattttactgtatattctagctgcgattattatgccaacagcaacacctgaatcagaatgggagtgaactaaaacatgcgttggattataggcgtaattattaactcggtgcttttcgtagctttatcaggattctttacaagttttcatgtagatggattcacgacagcgctactagcgagttttatattagcaattctaaatatgctaattagacctattttactccttttaacattaccaattaatattttcacacttggacttttcacctttgttgtgaatgcaattatgcttgaaatgactaccttctttattggagattctttccaaattgatggttttggaacagcgttaattctcgcagcaattatggcattcgcaaacatgattattaattccgttttatggggtaacaaagaaaaataaacattccagctacattttgaggctaaaaatagtcttttaaatgtagctggttttgctatgtagagccatttgagtagaaagaggtagcttgattccttctaaagtgctaaaatgagaaggagctttctaaataatattttgtagcgaacagtaatggacttttataattcatttggaggtacttgcatgacaaaatcggttacggtaaaggatttaaaggaacgacttaatttagagttaatttgttcggaaacgggacttgaacggccaatttcaacaagtgacttatctcggccggggctggaacttactgggtttttctcttattatccagaagatcgtgtgcaactttttggcatgactgaaatatcgttttctgaaggaatggaacctgaagaacgtctcaaaagatataaacaaatgtgtacgaagcggacgcctgcttttgtgatttctagaaatttagaagtgccgaaagaattagtagcagcagcgaaagaagctgatattccggtattacgttcacgacttaaaacgacacgtttatctgtttatattacgaattacttagaaagcagacttgcgccagttatttcgatgcatggtgttctagtggatatatatggtttaggtgtgttgattacggggagcagtggtgttggtaaaagtgaaacagcactggagcttgtaaaacgcgggcatagactcgtagcagatgataacgtagaaattcgccaagaggatgaaatgacgttaatcggttcttctccagcgattattgaacatttactcgagattcgcgggttggggattattaatgtaatgactttatttggagcaggcgctgttcgttctagtaaaaaaattactatcgttgtgcaccttgaaaattgggatcctgataagcattatgatcgtgtcggattagaccaagaaaagacaaaaatctttgatatggatattccgaaaattacggtgcctgttcgaccgggacgaaatttatctgttattattgaggtagcggcaatgaatttccgattaaagaatatggggtacaacgcggcagagcaatttacacaagacctgaataatttaataggtcataacagcagtatgaatgattaaataaatagtgaaagcatctccgcagccaaactttacaaaaatgcttgtttggttgcggagttgtctttttgaaagtaggggaattatgggtaatggtgttcagccacttgatccggtggcgattcaaattggtagtatatctgtgaaatggtacggagttattattgcttcggctgttgtcatcgggtgtacttcttgctttaagtgaagcaaacaagcgcaaaatggataaagaaattattgtggatttgctgatatgggcaattccgatttcaattattagtgctcgaatttactatgttatttttgagtgggatttctataagaataatttaggcgaaatagtgaaaatctggcacggaggtattgctatttatggcgcgctaattggtgcagttttaacggcaattattttctcgcggattaagaaaatttcgttctggcaacttgcggatgtcgttgcgccaagtttgattattgcgcaggcaatcgggcgttggggaaacttcatgaaccaagaagctcatggtgcagaaacaacgcgttcttttctggaaagccttcatttaccagattttattatcaaccagatgtacatagatggtgcttattatcaaccgactttcttatatgagagtttatggaatgtgcttggatttattgttctattaattattcgtcgcacaaaaattcgtcgtggggagttgttcctcggctatgtaatttggtattcatttggaagattctttattgaaggaatgcggacagatagcttaatgtggggggactttagagtttcgcaagtgctatctttacttcttattgttttgtctattggtattattatttatcgtcgtatgaaaatgaatccaccatattatatggaagataaatctggtaaagtagctaaaaagaaataaaaaagttggagattttcgagtttgattaagaaaggaagaaattatgactgggaaaattactacattgttgtttgacttagatggtacgcttataaatacgaatgaattgattatcaaaacatttcaagtgacatttcaagaattcatgccggaccgggtttttactagagaggacattttaccgtttatcgggccttctttaatggagactttccgggaaataaatccagcgcatgcagatgagatgcgcgctttttaccgagagtataatttgaagcatcatgatgatttaattttagaatatgatggagtttatgaagcaattcgtgctttatatgaagaagattataaacttggaattgtatcgacgaaaatgtatgatacgattatgcgaggtctcaaggtaactggcttggataaatttttccaagtggtgattgggttagatcaagtgtctaatgctaaaccagatcctgaaggtattgagatggctctttctttattaaatgcgacaaaagaagaagcgattatgattggcgataattatcatgatattgaagctggaaaaaatgcggaaaccctaaccgcgggtgtagcttgggcgattaaaggaccagaacatttggcgcagtttcagccagatttcatgttagaaaaaatgagcgatttactcgcaattgttagggacgaggaatagaatttgaggcggctggataggtttaaggcacccgatgatacagtcaacaccctttttcaagtgtataaaacgatttctttttggaaggttttgaagaatacgctagtaatagaacttggtcgtttttttccatggatgggcggtaagcgtgcaatttatcgcgcatgtcttggaatggaaattggcgagaagactgccattgcctataaagttatgccggatttattttttccggaaaagattatgattggcgaaaactcaattattggttatcacacaactatcttgacgcatgaatatttactttcggagtaccgtgttggggaagttgtgattggtcgggatgtgatggttggcgcgaatgtcaccattcttccgggcacagtaattggagacggggctgtgattgctgctggggcggttgtctcggtggatgtcccggctggtagttttgcttatggaaatccattaataataaaagaaaaagctactctgacgtaaaagtcaaagtagctttttttgtcgcccaaagtcataaattctatgttatactcattaggataaaggtatcttggaggtggaaaaatggaaaaagacaaaaaaacacccgcaaaaatctatccattttatccaaatggtcagttttattttgaacgcggtgtcgaagcgtttcgtgatcaaagaattaaagaagcaatcaggtatttagtgcgggcatccgaactggagccaggagaagctgttattctttgtcagctggcgatatgttatacagaaattggtcaattccataaatcgaatcagctacttagagaagttttagaacagcgtaatgggaacatggaatactgttattattttattgctaataattttgcgtatatgaaagattatcggagagcgttacaatatgctaatcgttatttggatagttcaactgatggtgaatataccgaggaagctaaagatttaattgaagttttattagaagaaacgccttttggtgagacaattgaaaatggcttttctaaattagaacaagaattctattcttataaaaaagaaattaatcgttatttagcagaagaagatagtgcagctgcttgcgatattttaagaaaagtcattgatgaaaaaccgaatttttggcctgcttataatcaactcgcttcgctttattttgagcaattgaaagaagaagagggcgtcagagttttaagtgatttattatcgagaaatccgggtaatctcttgggtatttgtgatttatttatttatcacttttataaggggaaccgtaaagaggcggatgagctttatctggaacttcgggatgtcctaccggttctagcgcatcataaagagaagcttggtctgattcatgcgatgatgggtgaatacgaggaagcggatgatttgcttgaacaagtggctgacttggaagtgactgagcgtagtaagtattattatttcc

SEQ ID NO: 3799 - DNA, 4508 bp, Listeria monocytogenes 4b
  misc_feature (1)..(end): n can be any nucleotide: a,g,c or t/u
tttcgaattgtactttcatcgcctaattgtataagcacttgaaaaatttcatcgttttctactgtagaatagagtacatcaagttcttcatctttataaaatgcatctccctcttttgttaaagtatctttgctggctaaagtgccatatacagtatcatcggaaggcgtgttttcatcagtcgttgcagcttttgcagcggctgcttcttcttcttgttttgctttttcctccgcttctttacgttccttttcagctttcgcggcttcttctttttgtattgtctcttgttttgccatgttgtcgttatatgcttttgaattgttattaataattacactatattcctcgtcttcatagtttttcctaactgctataagttttgcatagactcttgcttcggaatcgctgtttataattttggtaaaagtaaatcttccatcactatcttgtttaactgttgcgccatcaatggataatttggctttaggatccactgttccttctataagcgctttcccattttcatcagtcgttacagtagtttggtcaatagttaattcaatttctttcttttctttctccccactttcttcattgtcttcagaactcccacatgctactgtcaaaaaactgaaaaacattaaaatacttaccaacaataaacctctttttttcatcttctccggctccttttgtgattagatataaatatacagaacagctattataacatgaataaccttgttttttttaaaatgtgccatatatgatcatttgttaattcaatcatttttattttgtgcgcattactttccataacagcactgctcaaacaccgaaaaccaaacacaagccaccgaagctaccggcgcaatagaacaagtagaaacggatgcaattctaattaataatttcaaagaaaaaaaggataagtataatccggaaaccgcaatacgctttgacatcgtagataaatattacgacgaaacgggaaataaaataaccgacctaaacaaaaacgatgacgtaaaaatcattttaactaacgacttccaaatccaagaaaccaatccagcccaaatagacccaaaatacatacaaaaaatcatcctgctaaaccaataaaactctctcgcccacagagagttttttcttttctcaaaaaaataaactcaaattccttgccttggtgtgaactccagggtttataattctatatgtaaagaacgaaacgaggtgatggaggatgaatatcaaacaagcggctgatatgtttggtttaacagtagatacgttgcgttattatgagcgggtcggtgttattccgccagtccatcgtaacgaaagtggttaccgggactataaaacgagtgacttgaactgggtttatctcgtgaagaatttacggaatgcgggattatcggtagaatcgttaattgagtttgcgacacttgcgcagctcagagagacgcaaaatgtcgaagcggcgcaaaaacaagtactggttgaccaactaaaagaattagacgaaaaattagccgagatgaagaaggtcagagaactactcgtgtacaaaatcgattcgtacgatagtcacattgcgcagtttaaagctggcgaattaaatgcagataatgtagaaaaattatggaaacgggacaaattttaaagataagaggaggattttcaaatgaaaacagtgaaattaaacaatggtgtagaagtacctattttaggatttgggacatatcaaattacagatgctgctgaagcggaacaagcagtaaaagatgcgattaaaacgggctatcgtcacattgatacggcgcaaagttatatgaatgaagaagctgtaggtcgcggaattgcggcatccggcgtcgatcgcaaagaactattcattacgacaaaaatatgggtggaaaatgtaagttataaaggtgttatgagctcatttgaccggtctttaaaacgtttagggttggattacattgatttgctgctaattcatcaacctttcaacgatgtatacggggcatggatagcgatggaggaattacaagcatcaggaaaaattagagcaattggcgtatcgaattttagcccggatcgcgtaattgacctagctgcgttcaatgaagtaactccgcaagtcaaccaaattgaagttaatcctttccaacaacaggcagcgaatctagctgttttaagaaaagaaggggttacaatagaagcatgggcaccgtttgcggaagggaaaaatgatatttttaataacccagttttaacgaaaattggtgcgaaatatggaaaatcggccgctcaagtaattttgcgttggctagtagagcaagatattatcgtcttagctaaatctgtaaaaccagaaagaatggcgcaaaatctggctatatttgattttgaattgacggaggcagataagggagaaattgccagcctagatcaaggggaaagccagttcttctcacatgcggatccagaaatggtgaaatggatggctagtcgcaaactgaatgtataaacgaaaaaaggttctgcgtaaatgcagaacctttttttatttaactattgatgtcgatagctttaatccatcctagtgaattttgtctgtctttaagatgcaaccaatcttcaccaagaatggttgctgttttatccactgctaataattttccataatagaagcccactgcttttgggttagtacttgttgattctacaggtttgttataaagttttgctgttgggtctttcacgtaagcgacttgttttactggttcttctttagcgggagtataaaatacatttaagtctttttcgctagcccatccaacaagttttccatctactttaaactgataccaaagtgtatttccggctttagctcgagtcactagttctagtttttcgttatcataatctgcaagtggtgctaatttttctgcgttttttgtgttgaatggtgcagtccatacgttatcagttgcagatttacttactagagcatagccatcgtaagaagtttgttctgtgatgcgatcataaaggcgatcattcaacttatccgcgcgaacccagccaattactttctcgccttctgaaattcggaaccaagcatagcccccgcgagtgatttttttatctacttcaagggcttttctatcgtattttgcgatagttccattatcgaattgtttttcagggcttggtagacgatatacatgtgcgcttaaatcatctacatatttggttaaatgaacattttcatcttctttttgatgatagctgatttttaaggcattactatttatccaaccaatatctttgttgttctcgcgaataaagtaccatagacctttttctgttttagcttcccaggaaatttctaagttacgccctaagtaattttcgagggtcccgattttattagcattttctgtattgtacggtgccgaccaaataacctcttgttctttattttcagctactgttccaattgctgctaaggattgattagactcgattttatcgtaaatgacatcgtatttatctaagttgtaacgttcaataattgctactagtttagaaacgtaatctggatcagtcgcataaccaccgtctttaatagcttgcagtgctttgcggtagttcgtttcaccgacagcgtcttgatagcgcgcattttcagtaattaaagctgtgtggtcttcaatggattctttccaactagggtaaacgcggaaattagcggttgttgagccggatgcttccattgtccccatggagacagactcacctttatacgttcctttaattccgaataagttattagagttctggcttagaccactttcaccccaatttgattctaaaattgcttgagcgagcgttacacttgtaagcaatttaccatcgcgatatccatcctgagccgctggtaaaatttcatcaatgaaagcttgttgtgaagtagtcagattaacttgagctgttctgctacatcctgtttccgctccaacatttatggaaactaccaaaaatgccacaatgagcagaattatccctggctctataaacttcctatgcaaatttcaatgcactgctctttatatatctgcaactatattatcaaaaaatgccaaaaaatttctattacatttctatgacgaaaaacaataactacgccaaacctattgggacgtaaggactaaagctggaaatgtcaaatatgcaaaatctgagaaattttcttcaacaaacttttgtaccgaaaagacaagccatatgtgaaataataaaacgggcatgctataataatcagtatgtcagcgcattcattgttggagggtgttatatatgttaaacgaacaacaaattactagattgctatatagattgcaagatcctgtcttagaggcaagcttagaagatacagaaagtgttctagaactgcaagtgcttgagaatcagcaacatctaatcgc

SEQ ID NO: 3800 - DNA, 4684 bp, Listeria monocytogenes 4b
  misc_feature (1)..(end): n can be any nucleotide: a,g,c or t/u
aacttaaagggaaggctatatactgaaaccaaacaatacaaacgaggtgctggaatatggcagagaaaacaatagtagaaaaattacaactgactaaatataaagaagcagttatcctaaatcaaccaaatggagcggattatttccaaaatctagcaaattacgaagaaaaactagcagacaaacaatacgatttaattttcgattttgtggaaacgctagaagaattaattacgttcgtgcaaaaagttattgctgaaaataaacttgctgcgaatggttatttatttttcgcctaccctaaaaaaggcaataaaaagttcgctacatatgtacaccgcgatgaactcatgccagcgcttaaaaccgatgaagaaggttacgtcgacggtagcacactcaaattcacacgaatggtcgcgctcgatgaaacgtacacggtagttggtctaaaagaagcggcaaaactaaaagcgaagggcgttaagaaaaataacccttccgcagatgaatacgccgaccatgtacctctagtcgccgaatttctagcagacaaaggcgatttacaagccttctacaacaatctagcgacaggataccagcgggtttgggcgcgctatatttactctgccaaacaaccagcgacacaagaaaaaagacgtttagagatggttgatattttgagccaaggttataaaacgaaagatctttaccgacaagggaaaaagtaaccaaataattttatttggttatttttgcgtttgaaactgcttctttatgtaaaaatgtctaggcgtgatagaatagaagaggaataagacgaaggaaaatcttgttgcactggaaaaggggacatgcaggatggcgaattatattaacaaagaaaggcgccaaattgattttgatccatttgatttacggataattgccgtaccagaagtagtagcggtgcagtttaagccgcgctcagagcatactttacttattcgtattgcggatgtcggcgcaacctatcagccactcaaaaacgaatcactttttgaagctattttgcccgttcactttaatgatattaacgaagaagatgattactgggggcttagtgacaaagagcaagcggagatgaaactatttaacgaggtacatcgcgatttgatttataattttgtggatgagcacccagattttacgcagattgttgtccattgtcacgctggggtcagccgaagtagcgctgttgctatggcgattgcggaacatttacgcgacacggacacgtacgaaaaacttcaagtgataaaacgatacttaccaaatccgcgggttcttgcgattatgcggggcgaagcgtatttataaaaacgaaaacgaagaaatgttaggagagattttgtatggaaaagcattatgattatattgcgattggcggcggaagtggcggaattgcttcgattaatcgcgcagccatgcacggagcaaaatgtgcattaattgaaccaaaatttttaggtggaacttgtgtaaatgttggttgtgttccgaaaaaagtcatgtggtatggcgcacaaattaaagaagcgatggatttatacgcagatgcttatggttaccaagtggacgcgagcttcaacttccaaaaactagtcgaaaatcgagaagcgtacattgaacggattcgaggttcttacaaaaatgggctggataataataaagtagaatggattaaaggttatgccgaatttgtcgatgaaaaaacattgcgcgtaaacggcgaactagtgacagcggatcatattttaattgcaacaggcggcgaaccagcgcttccttccattccgggcgcagaatttggcatcacctcagatggcttttttgcattaaaagaactacctaaaaaagtggcggttgttggcgcgggatacattgcggttgaactagctggtgtactacaacaacttggctcagaaacgcatttatttgtacggaaacatgcaccactccgaaattttgatccacttttaacagatacactaaccgaaattattgagcaatcggatatgatgttgcataaacacgctgttcctcaaaaagttgaaaaaaatccagatggcagtttgacgttgagcttagaggatggccgcacagaaaccgttgatacgcttatttgggcgatcggacgtaaaccagtcatccaaggtcttcaaatcgaaaaagcgggcgtaaaacttctagaaagcggacatatcgccgtagataaattccaaaacaccaatgtagcggggatttatgcagttggcgatgtaacgggtcattatgaattaactccagtcgcaattgcagcagggcgccgtttatcagaacgccttttcaataacaaaaaagatgcacatttaaactatgaaaatatcccaaccgttgtatttagccatccagctatcggaacggttggtttaacagaaccagaagcaatcgaaaaatacggcaaagaaaatatcaaagtgtacacttctagctttacctcaatgtatacagccatcacagaccaccgcgaaccttgccgaatgaaattaatttgcgaagggaagacagagcgcgtcattggcttgcacgggattggttacggtgtggacgagatgattcaaggattcgctgttgcgattaatatgggcgcaacaaaagccgatttcgacaatacggttgcgattcacccaacaggatccgaagaatttgttacaatgaaatagaaaacaacgatggaggaggaagtacgtaatgggaaaaaaattatcactttattttgtaagacatggtcaaacctacttaaataaaaacttgcgcatgcaaggatgggctgatacgccactaacaccagaaggaattgaaatagtcaaagaaagtggtcgcggacttgcggaaacagaattcgttgcagcgtattcaagcgacttacaccgtacgattgcaacagcagggcatttattaaaagaaaataaacacgcatttggtttaacactagaaccattaagtgaatttcgggaaactttcttcggctcctacgaaggtgaaaaaggcgatgttgcctggaacgaaattgcgcatcatatgggttatgcgaatcaagaagacctatttaaaaatgccgatgtacgagaaacaatgaatggtacaaaagcagctgacccaacaggagatgcggaagatttcatgacattctggacacgtgtagaacaaggtttcttgcatgttatcaatcgtcatcgcgaaactggtggtaacgttcttatcgtcgctcacggaaatactattcgtaacatcgtccacgaactcgaaccatccatggacgaagcggttattttagataacgcgagtgtcaccgtactagcttacgaaaacggcttattcaaattagaacgtttaaatgacacttcccattttaaaaaagcatagaaaaaacgagctttaggaactagtttcccaaagctcgtttttttattctttcggtgtatccggatcaggaagattattatcaatcgccagctgacctcgccgcaatttaattaaacgattaacattcacaataattgttttcacaaccgcataaagtggaacacctaaaatcattccaaagattcctgctaagtttccagcaacaatcaagataatgataatagttagtgggtgaatcgatagtgatttacccataatatatggagaaagtaagttagagtcaatttgttgcacaatcgttacgacaacaataacgagcagtgcttggactggagaagtaaatagcgccacgataactgcgggagctgctccaatgaatggtccaagataaggaataatattcgttgcacctgcaataaaaccaaacagaagcgcatacggttgaccaataattaaataaccaatgaaagtaaataaaccaacaaacatacaatcaatcgcttgtgaactaatataagtagaaatggttttattcatttctttaataatttgttttgcttcagaacgaatacctgccgggaaaaatcttccagaggactcaacgaacttatgaccatctttaaacatataaaagacgataaatggtacagttacaagaatcataacaaaactagagacaaaggagacaatggctccaaaactagaagctaccccgtcaacgaccacagacatgatttttggtaaggaaatgttgagcttctcaagttcttgttttatgtctaaatcttttagtgcagaattattcgagagatcttgcagccatttttcaaaatcttgccagtaacctggtattgcttttgcgagttcagctacttggtcagcaagcgttggaccgagttgcattactgcaagaacaacaagcgtgataaaggcaataaaaattaaaataacactcaaaagtcgaggtacttttcttttttctaaaaataatacgagcgggttaaataaatagaataggaaccctgcgaccaaaatcggcataaacaatgtagaaactatgatgccgattggtgaaaatatgtacttcatttgcaatagaacgaacaaaatagctacaaccgctaaaatttcaattgtccaaaaaaataatttactatctcgaaatcgtgaaaatttcaaattctccccttctttctaaaaccttattgataaattttatagtaccattaactgcttt

SEQ ID NO: 3801 - DNA, 3030 bp, Listeria monocytogenes 4b
  misc_feature (1)..(end): n can be any nucleotide: a,g,c or t/u
agcttaggaattcaaccaaacattatcgttgttcgcacagagcagccagtttcacaagaaatgaaagataagattgcgctattctgtgatattaaagcttccgaggttattgaatctcgcgatgaagaaacactttataacgtaccactttctctacaaaaacaaaaaatggatgatatcgtccttgagcacttacaattagaagcaccacaagcggaaatgacggattggaaaaacttagtacatcgtgtgaaaaatctttccaaaaaagttcgtattggcctagttggtaaatatgtttccttgcaagatgcttacctttctgtagcagaagcacttcgtcatgcaggatatgatcatgatgcagaaatcgaaattgactggattgattccgaaaaagtaacaaaagaaaatgttgctgaaatcatgaaagacgttgatggtatcttagttcctggtggtttcggcgaccgtgccattgaaggtaaaattgctgctattgaatatgcacgcgtaaacaaagtgccttattttggtatttgtttaggaatgcaactagcaactgttgaatttgcccgtaatgttcttggtcttgaaggagctcattctgcagaaatcgaaccagaaacaaaacataacatcattgatttattaccagaacaaaagaacatcgaaaacatgggcggaacacttcgtttaggactttatccagcgcgtattaagcaaggtactaaagccgaggccgcttatggtacaactcttgttgaagagcgtcaccgtcatcgttatgagtttaataacgaatatagagagcagatggaagaagctggtatgattgtttctgcaacaagtccagatggtcgtttagttgaagtagttgaattagctgatcatccttggtttgtcgcttgtcaatatcacccagaattcatttctcgtccaaatcgtccgcaaagcttgtttaaagattttgttggcgctgcacttaataataaataaggtaataataaaaatctcccagccataattggctgggagatttttattattattatttagtagcactaaggttcgaagcttttgtccaaccaataaaggtggagcttgttcttattcgataccaaagttgcccttcgaccgttgcttgtttatccacggttagtttttgacctttgtaagcagctaaagtgccccatctaacatccgcatctacaacaggaactttgtagtacgcttcgtttactttgttcgcaatcacatagcgagttaaattagtatctttctccatgctttgcttatagaacgtatcgagtgcacgagtatcaacccaaccgattactttcccgtcaatgctgaattgataccaggtagtaattactgttttagcttcgcgcaagattcgcatgtttttaccttggtagaccgaaagttgattaacaagtttagagccttccgttctgtaaggttttgtccaaacggcattgcctggcgcagtttttactctagcataggctgtggcgcctttatcatattcaattttatcgtatggcgtagttgttgttaagttcgaagcttttgtccaaccgataaaagtagtgcttgttctaacgcggtaccaaagctgtccttcgaccgttgcttgtttatccacggttagtttttgatctttataagcagctaaagtgccccatctaacatccgcatccacaacaggcactttgtagtacgcttcgtttactttgttcgcaatcacatagcgagttaaattagtatctttctccatgctttgcttatagaacgtatcgagtgcacgagtatcaacccaaccgattactttcccatcaatactaaattgataccaggtagtaattactgttttagcttcgcgcaagatccgcatgtttttgccttggtagaccgaaagttgattgacaagtttagagccttccgttctgtaaggttttgtccaaacggcattaccaggtgcagttttaactctagcataggctgtgacacctttatcgtattcaatcttatcaaatggagaggtagctgttaagttggaagctttcgtccaaccaataaaggtagtgcttgttctaacgcgataccaaagttgcccttccaccgttgcttgtttatccacggttagtttttgatctttataagcagctaaagtgccccatttgacatccgcatcaacaacaggtactttgtagtaggcctcaccagttttgttggaagcgacatagcgagttaaattagctggttgttccatgctttgtttgtagaacgtatcgagtgcacgagtatcaacccaaccgattactttcccgtcaatgctgaattgataccaagtagtaattggtgttttagcttcacgcaagatccgcatgtttttaccttggtagacagaaagttgattaacaagtttagagccttctgttctgtaaggttttgtccaaactgcattaccaggtgcagttttaactctagcgtaggctgtgacgcctttatcgtattcgattttgtcgtaagtaactttgctagcttgaatcgctttgtacttttcattaatcaatgtaacaaaactattgaaattataaccccattggttgaaataagaaacaggatcagtatgggttgttccgcctaaataacgtgtaactgcatcgtgggaccagactgttcctttgccgtcactgtgcgcgctatcaacaggaaggttatattgatctaaaaggtacgcagcataataggcatagttattaatagaacgagcaaattcatcgaatgtcttcgaacgaactaattcaacttggataaaacgagcattagcatattgtcctgctccccaaacaccattttcagtaggatggatttggattatacgagacttgtctacaaaagcgtgaacaaaggcattgttgtagttggtactcatataattgatttcacctgtaatagtagatgaattatttgctgtttcatgaataactattccttctggtttgccgtaaccattacgat

SEQ ID NO: 3802 - DNA, 3245 bp, Listeria monocytogenes 4b
  misc_feature (1)..(end): n can be any nucleotide: a,g,c or t/u
aaaattgccactggcgaaaaaagggagagtgtgaaagtgaacaaatttttcaagaaaactacacatgttttactcgtagcagggctcacaatcggacttacagcaccattcaccgggacaacagcacaagcagcagcggataccgttcccattcagattttgggaataaatgatttccacggagcgcttgaaacagcctctaaagatgcatcaggctcaccaattggcggagcagattacttagctaccaatttggataatgccactaactcatttttacaggcaaatcctggggcgacaactgacaatgctatccgtgttcaagcgggcgacatggtcggcgcaagtccagcagtatcaggtttacttcaagacgagccaacgatgaaagttctccaaaaaatgaatttcgaagtcggcacattaggtaaccatgagtttgatgaaggattaccagaatacaaacgaattttggacggagtttctacaaacaaattcggaccaatcgtagaagcttatccacgcgttaaaagtgacatgaaaatcgtcgcagctaacgtggtcaacaaaggaacaaacacagtcgcagaaggctttttaccatactatgtaaaagaaattgatggcgtcaaagttggcttcatcggtatcgttacaacagaaattcctaatttagttcttgcaaatcatattaaagactatgatttccttgatgaagcagaaacaatcgttaaatactctgctgaactaagaggccaaggcgttaacgcaatcgttgttttatctcacgttccggcactttctactggaaatcctaacactggaacaaaacaagatgtagctggggaagctgctaatatgatcacaaaagcaaatgaattagacccaaataactcggtcgatttagttcttgctggacacaatcaccaatacacaaatggattagtcggaaaaactcgtatcgttcaaagttacaacaatggtaaagctttttcagatgtaactggcgaacttgataaaactaccggcgatttcgttacaccacctgacgctaaaattacatacaacacgagaagcgtcacaccaaatgccgatattacagctgttactgaagatgcgaaaagccgcattgaaggggttatcaacgaaactatcggactagccaataaagacgttatttctcgtgacaccaatccagacaacaaagcaattgatgataaagaatcagagcttggtaacatgattacagatgcgcaacgttacatggcaaataaagccggcgccgatgtcgactttgctatgactaacaacggcggaattcgttctgaccttactactcgtcttgcaaatggccaaaacgaaatcacatggggcgcggcacaagctgttcaaccatttggtaacattcttcaagtagtagaaatgactggtgctgatattttggaagctctaaaccaacaatatttaagcaaccaaacttatttcctacaaatttctggattaaaatatactttcactgatacagatgacttagatcatgcgtacaaagttacaagcgttacaacagaagacggaactcctttaaaagccgaccaaaaatacaaagtcgtaatcaatgacttcctatttggcggtggcgatggattctctgccttcaaaaaagcaaacctagtaactgcaatcgacccagacactgaaacattcatcaactacatcaaagaccaaaaagctgctggaaaagtcattacagctcaaaaagaaggacgtaaagtctacaaatcccaagctgaaatcgacaaagaaaccgaagatgcagctatcaaagcaatcaaagacgcaacaaaaatcaataaactagccgaaaaagacaaaactctaactggaacaactttgcctggcgcaactgtctctgttcaaaaagcaactgctaacgcaagaatggcccttgctgccggacctaacgcaacagctgacgcaaatggcaagttttccgtagatgtaacatctttaaaccttaaaaaaggcgaccaaatcacaacaactatcactgacccgaacggatacagcaccactttccaagcaacggttcaagctgcggcaacaactcctccagataatggaaacggcggcacggacaatggtaatggaaacggaaataacggtggcacagatggaaatggcggaacaaataacggtaacggctccggcacaaacggcggaactactactaccgaagatccgacaactacgacaccaaacacatcaacaacaggaacttctgctaacacatccttaccaacaactggtgatacagctggatttgcaactgtattcggtattgttttaacgactactgcgctttatgttttgcggaagagaagttaattgagaaaaaggagcagccaaattggccgctccttttttatctttttcctgtattaacttctgtttttaaaacccaacttcctggaacaccctttgtagtagttaaattaagcgttttttctgtttctttataaacaaaaacctttgttcctgcttctaaatatcctttaatatttgtgcctgatatagcatcatcacttgtcaaatatttacctgccctatattttgttaccatagccccaaaaatctcttgtactgctgctacaattcctaaacaataatcagtttgataagctttcttctcaagaattaatgcatcagtgctatcacaaaaaccagcttccagtaagatagcgtccattgctgtttctcttaatacagcaaaattagccttcttcatcccacgatcattcattccgtgtttagtaactttagcaataatatttttatgaatgattttctgtatttctaccgttgcagccgggacggatgtgtaaatataatcttcatatcctttaccgccaccagcattaaaatgaagcgaaataaataaatcagctttaaaactattcgccttcttcgcacgatcacttaattcatagaatgtatcatttgtccttgtcattcccacttcaaaaccagctttaactaactccgtttgaagttgttttgctacagttagtacccaatttttttcaacaagtccattaccactcgcacctgaatccttaccaccgtgtccagcgtcaatccatatctttgtcatgtttttcctcatcctctcctgactttgcatcgaaaatcaaaattaaatatttcaatacttccgggacctttccagcacactggtgcccctaggc

SEQ ID NO: 3803 - DNA, 3210 bp, Listeria monocytogenes 4b
  misc_feature (1)..(end): n can be any nucleotide: a,g,c or t/u
gaactttacggaaagtataaagcaaagttatcctatgataccattcactcgctaaaagataaagaaccaggaaaacttgttcttgttacggcgattaacccaacgcctgctggtgaagggaaatcgacagtgacagttggtcttggcgacgcactgtctaaaaaagataagaaaaccgttattgcacttcgcgaaccatcgctcggacctaccatgggtattaagggcggggcaacaggtggcggatacgcgcaggttattccaatggaagatattaatttacattttactggtgatttccacgcgattacagcagcaaacaatgctttatcggcatttattgataaccatatgcaacaagggaatgacctagatattgacggccgaagaatcgtttggaaacgtgtggttgatttgaacgaccgtgcacttcgaaaagtggttgttggtcttggaggtcctattcaaggggttccacgtgaagacggttttgatattacggttgcttctgaaattatggcgatcatttgtttagcaagtgatttaaaagatttaaagaaacgtttaagtgaaatcgtgatcggttataactataaaaaagaaccaattacagttggcgaaatgggctacgaaggcgctctaaccttactattaaaagatgctttaaaacctaatttggtgcaaacattagaacatacacctgccatcgtacacggtggaccttttgctaatattgctcacggatgtaatagtgtttctgcgacaagcacagcacttcgactaggtgagtatgtagtgacagaggctggatttggtgcagaccttggtgccgagaaatttttagatattaaagttcctgcccttggaaaagcgccagattgcgttgttattgtagcaacgattcgcgcactgaaaatgcacggtggcgctttgaaaaccgagcttagcgaagaaaatgtggatgcgctagctaaaggttttactaatttacaaaaacatacggaatctattcaaacatttggtattccttatgttgtagccattaataaattcattaccgattctgacgcagaagtagcgaaattagaagcactttgcgaagaacacggcattcctttctctctgacagaagtttgggaaaaaggcggcgacggtggccttgaactcgcggataaagtcattgcggctgttgaaagtggagaagcggactacaaacgcatttatgatgatgcgtggtcgatagaagaaaaactagaagcgattgtgacgaaggtttacggtggtattggtgtggaactttccagcaaggcgcagaaacaaatcgttgaattcaaaaaatatggttgggaccgctatccgatttgtatggcgaaaacccaatattccttatcggatgacccaacattacttggacgcccaactgattttgttattcacattcgcgaattcattccaaaacttggtgctggttttgtcgttgctttaacaggcgatgtaatgacgatgccaggtttaccgaaaaaaccagcggcacttaatatggatgtcgatgaaaatgggaatgcacaaggtttattttaaaagtaaaagttccaaaagtggaagagccgcttttggaacttttttcatcttaagcaattgctatgttctatgttttcagctagaatagataaggacgaacaggaaatggatgggactaaatgaaacaattaaaagtggaaaatttaacaaaaacatatggtgaaaaaagcctgtttgaaaatatctcgctaacgataacagagggcgaacgtattggtttaatcggtgtaaatggtaccgggaaatcgacgttattgcaaattatttctggtagtgaatctggggataaaggtactgttacgaaagcaaaagattatacgattggttatttggcgcaagatcctgaatttaatgaagaagatacagttctttcggctgtttttgacggggatactgcggcgcttcgggcaatgcgcaagtacgaagaagtgttacttgcgatgtcacttgatgcggaaaataccaaattacacgatgcttatacagccgccagccaagaaatggatgctagtgcggcttgggatatgaacacagaagcgaaaacgattttggagcgtttaggaattacagatttaaccgcgaaaataagcgagctttctggtgggcaacgaaaacgggtaggtttggcgcaagtcttaatcgagacgccagatttactcattttggacgagcctaccaaccacttggattttcagtcaattcgttggttggaagaatatttaaatcgctttaaaggggctgtcttgcttgttacccatgatcgttattttcttgaccgagtgacaaatcacatggtggagctcgaccggggttcggcttatcgatacgttgggaactacgagaaattcatggaatctaaagccattcggatggaaaacgaagtccgtgaatctgagaaaaataaaaacctttatcgtaaggaactagcatggatgcgtcgcggtcctcaaggtcgcgccactaaacaaaatgccagacaagaccgtttccacgatttagagaaaaaagtgaaaacaaaaaccgatgactcagaactggcgattgattttgttactagtcgtcttggaaaagatgttttcgaactgaaaaacttggaaaaacgctttgatgaaaaacaagtattgcaggatttcagcttgattatccaacctggtgaacgccttggtattacagggaacaacggaactggaaaatcgactttactgaacatgttggctggaaaactagcaccagatgctggggaagtagtcacaggtcaaaccgtacaaatcggttactatacgcaacaaaatgaagaaatggacccggatatgcgaatgattgcttatttgcaagaagcgggagagcaagtcacaacttctggtggcgaagtaatcagtgtgagtgcgatgttagaacgatttttattcccaccaaattcccacgggaagaaaattggtagcttatcaggtggagaaaaacgacggttattcttacttcgcattttgatggaacgaccaaatgtcttattactggatgagccgactaatgacttagatacgcaaacattaaccgtattagaagactatttagaatcattcaatggtaccgtaattacggttagccatgatagatatttcctcgataaag

SEQ ID NO: 3804 - DNA, 4848 bp, Listeria monocytogenes 4b
  misc_feature (1)..(end): n can be any nucleotide: a,g,c or t/u
gactgggaaagcccagcctctttgattttattcgtcttttttatcgtttggtgtttgctcaatgtttggagcatcttccgaagttacttcttttggttcttcttttggttcttcttttggttcttcgattttttcttcttcttttaactcttctttttcttcttcaaaagatttacctgctacttcttcgtctttttcggaaggatattctgcttctacgtcaatcgtatcgatatctggaggcattacaccgtcatcaaatagggaacgaatttggcgagcatctaaagtttctacttttagtaatgtttccgcgataagtttgtgttgttcttggtgttctgtaatgattgttttagcgcggtcataacagtagcggattaagctctgaacttctgtatcaatttcgtaggcgattttatcggaatatcctttgtcgctaccgaaatcgcggcccataaatacttgaccgttaccagaagtgaattgaagtggtccaatcttgtcactcataccccattcagttaccatgcggcgagcaagttcggttgcacgttcaaagtcattacttgcaccagttgttacttcaccaaaagtaacttcttcggctacgcgtccaccgagtaaaccagtgatacggtccattaactcagctttcgtcattaggaagcgatcttcttttggtaacattacggcataaccaccagcttgtccacgaggaacaatggtaactttatgcacaacttccgcttcatcaagtaccattccgacgataacgtgaccaccttcatgatatgcgactgtgcggcgttctttttcagagataactcgatttttcttagctggtccggcaattacgcggtcactagcttcatcgaggtcactcatatctatttctttcttatcggaacgtgcggcaacgagtgctgcttcattcagtaagttttctaaatcggcaccagagaatcccggtgtacgttgagcgattgcttttaaatcaacacttttagcaagtggtttgttacgagcatgaacgcgaagtactgcttcacggccttttacgtctggacgatcaaccatgatttggcggtcaaaacggcctggacgaagaagtgctgggtcaagtacgtctgcacggttagttgctgcaataatgatgataccttcattgccaccgaaaccatccatttcaactagtaattggtttagggtttgttcacgttcatcgtgaccgccgcccattcctgctccacgttgacgacctactgcatcaatttcatcaatgaaaatgatacatggtgcatttttcttcgcattttcgaataaatcacggacacggcttgcaccgacaccgacaaacatttctacaaagtctgaacctgagatagagaagaatggcacgcctgcttcaccggcaaccgcacgagctagcaaggttttaccagtacccggaggacctactaaaaggacaccttttggaatacgagcgccgaggtccgcaaatttacgcggatcttttaggaattctactacttcaacaagttcttgtttttcctcgtctgctccagctacatctgtgaagcgaactttcttcttgtcgtcgttgtaaagtttggctttacttttaccaaagctcattactttaccaccgccgccaccttgagactggctcattaggaagaagaagaggatgaagataattacaaaaggtacaatagaagttaggaatgtaacccaaccgctgttttgtttggcaggtactattgttgttttcacgtcttctttatcaagcgttttttgcaaatcgcctagtgaagtatcgctgtttaaagcgtatgttgtgaaagcagtgctgcttgttttgctttgtccaagacccgtttttttatcgtcggaacttttatcgctagatttaaattccccattgattgtataaacactacggtctggctgtatttctacggatttaactttaccatcttctaacttactcacaaattctgaatagctaatatctttggctgcctctttgtttgagttaaatgaagcaacaatcccgataataacaaggaatattatgacataaaatatcgcatttctaaaaaacctgttcattccttacctcctcccacgcaagagcttggattcttactttttctggactttacccctttaaaagttgtttttggctaatagcagatttagaaacaattttttcttcccctgattattaaaaaacacatccgtttcgcttttctcttacgaagttattctattattaatatagattttttaatatttattgatactattttcaccttcgaaaactaagactaatgatagcataccgaatctcgattgcccactattttgcatgtttgacatcaattttttgttttcgttttctgaaaagctatctattacattttaacaaaatattgttctgtttgttaattaatttcactcgctgtatatttctggttttaaaataccaatatatggtaaattgcggtaacgttctgcataatccaaaccatatccaacgacgaattcatttggtacgacaaagcctacataatccgcttcaatttctacatttcgtccagctggtttatcaagtaaagtaaccaacttaactgattttgctttacggtatttgattaggtctactagataactaagtgtacgtccgctatcaatgatatcttcaattacaagtacatcgcgaccttctactgacgcattaaggtctttaatgattttcacttcacccgatgatacagtaccatttccataactggatacgtccatgaagtccatttctaagtatgtgtctactcttttaagtaaatcagtcataaaaggagttgctccttttaacaccccaactactaatgggtttcgtccttcatattctgttgttaactcacgacctagttcacgaattttctcttgtaattcgtcctccgatatcagcactttctgaatatcattatgcatgctctcgtttcctcctatatttcgagtgtacctaataatgtattgctttttgctacgactaaattctcggtcatatgcagacttcttcacaccgggaacccaaaggattttcccagtatagtctgttatcacagggagcttgtcgcgttcttgccttggtattttggcatcgatgaaaatatctttaagtttcttacttcctgcttgccctttcatcgtcatcctgtcgccgttcacacggtttcgaacaatcaaaggaagtgttatctcttcagcatccagtagcattccatttagcccatttgtttgaacaacggaactttttaactttaaacggatacttgctttattatctaattcaatgcggtcattcagttctagttgatgataaaactcggaaggagcttctctttctccaaattgaaaatgaagtttatcgtatgctctgtttgcaacgagtttatttggtaagtcaatcgaactagatggattgtcgctttgaatcatttggataatctgatatatgtgatttaccgttataaaactggcatcttcattgtacagatatctcaatagtaaatgaattgcgcggcgttgtaaaggattcgcttcatttttaaagttagtaagtaaaagtgttgtccgtttgccgtttttgatgaggtttttcttcaataaatcactcgcaagtgcctccaaaaattggaagtcttcgcttgtttcttctgaaaatctttcgaagtgcgaatagacagctggattttcttgctttaaaaacggtaaaagttgcgctctgtaacgatttcttgtgtattcttgactagtatttgattcatcgatttcgtatgccaattcgtgtttctgggcgtaatcaataatttctgcttttgtaattggtaaaaaaggacggattgcttgtcctccttttaactcgcgttttggttggatgcctgaccagccgatactagcacttccgcgaactagtcgcattaagattgtctcgatttggtcatctgcatggtgtgcgagcgctagtttgttgatctttttctcagccattactttctcaaagaaatcatacctgacaatgcgcgctgtttcctcgatacctttttgcaaactctcagctcgactttttacgtctacttcttctatgtaaaaaggaatgccctggctctcgcaaaaagcttcgacgacgttttgttcattcgccgcattttcccttaagtggtgatttatatgtgcgacggaaattgcttcttttgggactaaatttgaattccataaaaaatgcagtaacgccaaagaatccggaccgccagaaactgccacaagcaatttatcatcggatcggattaaatcatgtttctcgatatacttatgtactcgtttatcggtgtcatccattcaagaaaaccttccttcgaaattcggctctcacattttttattaaaaagtgcaccgtattaatgatccaatacggtgcatctactttacaattaattttagcgtattagccgcgttttgctcctcggccgccacgtttagattctgtttggcgtttgatagtagtgagtctttcatcactatctttcaagaatttagacattatatcttcaaagctctcggctggtttcacatagttcccagcaggttttttgctgtatttcggcttacgatcgtaacttttctctgggcggtccggacgatctactgctttacgaatggacagaccaatcttaccatcatcaccaatattcattactttaacagtaacttcatcccctacagttaagatgtcattaatgtctttaacatagttatctgctacctcactaatatggacta

SEQ ID NO: 3805 - DNA, 5868 bp, Listeria monocytogenes 4b
  misc_feature (1)..(end): n can be any nucleotide: a,g,c or t/u
cagaccgatctttcttcttcgtccagatcaagatcgaccggaacgagcgcttcataacatcaaagaaactgagcgagctcaccatattggatgggtcgacataaactcgtattttacgtaaaacttctttaggtcgtttagaagcaaatgtgtatgtgccgttgcgctttgttttaatggcgtagcgagggatccacttaccttttagcatagcggatacgataacttgatctacttcttcccaagggatttggacgcaatttacgcacatcacgtgagttaaaaaattcaaaacctttgtcgccaatcataattttcccgtaatctgtaagtccagtatacgcggtggcatctattgttaagtctacctttgtattaatcgattgaaccaactgtattcgctccatttcttttcgcttgttttgtttattataccgtaattcgtttatctgtgtcatatatctaaacgaaaagaggctcggtgaatattgcaccagcctcttttcgatcagcttatttttacagaagcccgattaagtgaccaactataccaactacgaatagacctagaatgatgataattgggctgatttttttcttaagtaaccacatacataggaatgtaagagctactgctgcaagtcctgggattaagttatccaagttattttgcaaggttgttactttaatttcagaaagagctaaacctgcttgttgttgttctaaagcagttttgataccttgagcgccttgtggaagatgactccaatcaatatacgcaccttcatcaagtttaactttcgagataattggcgcaaactggatatttacccatctctgcaccaaggcggcgaggacgaacatcccgagtatcgaagcaccttttgtaatgtcttgtagtaatccaccagaaaggtcatcagtaattttagaaccagctttgtagccgaattcttgtgtataccacatgaagccccaacggattacgttccaagcaacgaagaataagattggtccaagaatgtttccactcaaggcaagagaagcacctaatgctcctaacattggacgaattgtaaaccagaatactggatcaccaacaccagctagaggtcccatcataccaactttaaccccttgaattgctacatcatcaacttctgctccattggcacgttcttcttcaagagcaagtgttacccctagaattggagatgcaatatatggatgtgtattaaagaattctaagtgacgttttagagcttgcgaacgatcttctttagttttatataattttttaatagcgggaatcatagagaatgcccagccaccattttgcatacgttcgtagttccatgaaccttgaatgaacgtagagcgccatgctacgcgtagacggtctctctttgataattcgattttttctgccattctattctcctcctttttttattaatagtcgtttaatatatcgcccagtggatcgcgagagtttccgcctccaccgccgtttgagttaccgccacccattttagataggttaaggtaaataagagcaagtgcaacacctagagcaccaattgcgataagtgtaagttgagaaattgcagctactacgaaaccgattacgaagaacggccatacttctttagtagccatcatgttgataactagtgcataaccaacggcaactaccattcctccaccgatagccataccatctgttaaccaagctggcattgcttctaagaaagattgaacgctgtctgctggaatgaataaaagtgctgctgcaggaatcgcgatacgaataccttgcatacaaattgctgaaatatgtaaccactctacgctgcgtatattccctttttcagcggctctgtccatcaagtgaacaattggaactgccaatgtacgaacgatcattgttaagaaaagacctgctactgctagtggaattgcaatcgcgattgcagatggaatacctgctaccccttgtccacctaatactaatataattgctgaagctactgaggcaagcgcggcatctggtgctacggctgctccgatgtttgcccatccaagtgcgatcatttgtagagttccgccaaggatgatacatgctgttaagttacctgttacgagaccaattaatgtacatgcgattaatggctgatggaactgaaattcatctagaattccttcaatacctgctaaaaatgcaataagtactactaaaattattgatatgacagacataataaacctcctattttaattttttattgtgtctttagttcgtgttttgcttttttgatgatgtcttccatgtttgcgcttgagtcattagggactttacgcacatcgaatttaacgcctttttcttttagtttctcaaaggtttcaacatcatctttccccatggaaagtactttgctaacaacaactttacctacagagtgagccatggaaccaacgtttacttgttcgatttctacgccaccttcaattgcgcgtaaaacatcttgaggattttcgaataataaaagtgcttttgtattgccgaaacgcggatcttttgaaatctcaatcattttttggactgggataacgttagcttttactcctggtggtgctgcttgttcgattaattttttacgaaggtcgtcttttgcaactgcatctgaaacgacgataattcttgttgggtgtgttgcttttgtccatgcagtggctacttgaccatgcaagagacgtgaatcaacacgagttaaaacgaattcgatttttccatcaccaactgcagcgatttctgcttgtggctgttcagtagctgttacttgcggctgtagttcttctggtttaacgcggacaccttcttgagctggtgcaagaatatttgctgcgatttcgtgtgcgctttccattgtaaaacgtgatgagaaagcttcaatcagcattggcaaattaagtcctgctacgattgcccacttatctttatgtagttcataaagaccgtttgcttgattgaatggtgtgcctccccaaagatccactaagaataaaacttcatcttggctatcaaaggatgcaattgcagcttccattttagctttgatgtcttctggaccttcgcttggcatcaaagtgattgctttaacgttttcttgctcgccgaaaatcattgttccggactgcaaaataccttcagcaaattcaccgtgagttgcgaggataattcctaccatctttttccctcctaatataattcatttattttgctacccgctatatttattgcaagttctgtgccaatttatagtattactctcaaaacccttatacaccaatgattttaacatctatattaatactataatcattagtgtatcgcctattgatacagaaaatacgttttgattatttagtgtatctgaaaattgttgtatctatatcaaaaaaacgtaataaatttatctttttttatagatcgcgtaaaaaaaccacgcaaatgtcatttaagcgtggttttttacaggtctgttttaagcacaagttgcctgataaggtcgagtcaataaccaaggtgttccttttatatttaagtcaccttcattgactagttcgtttacaactgacgacatagtagacactgagcatttggcaaatcttgctagtacatttattcttaaccatcttggaaattctggtttgttctctgaatttatttgataacgctcgataattttcgccaaaatcatttccgcacgttctgcaggatcaacagaaattagcgttctttgccagtctagacctttctcaaagtcttccgctatttctaagaaaaatgttggtaataaatgttggtcttctaattttccaattaattcttctgctcgaatgatgctataagaggtatcttctaacgccgttaaggtaatgtctccttttgttgtaaaaataattcgttgatcgataaaaacacgatacaaatcatctttaccttcctcgtttacttgtactagtaaacctttctccatgactattacttgttcacggttcatcgttatttcgccacccgccattaatttttgacgcgtaaggtgaaaattttttataatccatgaataaatcaacaaatcttctttgaccaattgatggaattctaaaaaagtcatttgaatttacttcctttcgttcattttcttatggctaatcaacagcttatttaaagtatagtacaagtatgttagaaatatgttagaaaaattctttttttatattcatttataaaaaaggatgccacgtagacatcctcacttttcttggttatgctttattcacattcttagtcattttagtagtttcacatagatgcgctgccaaacaattaatgccccacacgccacaaaaaaactacaaatagttagataggttcttattccgaactgaataactcccggaaaatctgctacttgtataatagaaaaatgcactgacttcattgcaaaaaaaccaacaaaataaagcactgtgatcaaaagaaatcctgctaattgtttcatttcgttcttcatttttttaggtactcttatcttcttccaaaaagaaagtaagtggaatagccaactactccaaaatattagcaccgtatactgaaaaggaattgcggtaatttgtaatgtaataaggcttactgaaagtgatgctccaataacaattaaaaaagaagtaacctctgcatttaactgatagcgattatgccataattgatagcgctggattcgttttaagggttcctcagcgctacataaaaagcgccgaatccccactaaaatcaataatatcgccagaaaaaaaccaagtaataaaccaataatcaacagaagtgtactaaaaaattcgcttgtcatcggaccgcctactctctgtttgttttcgcttgtttagtctttcaaaaatccgctccgcttgcttagcatccgtagaagcaaactgtgccatgatatttgcttcattttgtactaaatgtaaatatccaagtgccacaaagattgggtccgaagcaactgcatctaaaatactgatttcactatagtcaaaaaagcttaaacaatcaatatgctcttctaacacggtttgttgtccttcttttgtattaataacaaagccctctacttctccttcaaaaaactgccccataggcgagacgattttaagtttcatttccttctcctcctatttcaagtctttgtaggatccgataaataggaaatcacgttctgagcgttcatcataatcaccgttcaaaatgcgttcgatactccctagcaaatcttcaatttctacaaatgtgccttctgttccagtgaatttttccgaaacatagaatggttgtgaaaggaaattcctgattttccttgcacgatgaactagttttctatcttcatcacttaattctgccattccaagtacgttgatgatttcttgcagttccatataacgctgtaagataaatttcacttgcgccgctaattggtagtgtcgctcgccaacaaaggttggattgagtgctcttgagaatgattgaagtggattaaccgctgggaaaatcccaagtgccgcaatcgaacgctctaatacaattgttgagtctagatggctaaacgtcgcaactgcagatggatcatcaatatcatctgctggtaaaaatacacactgaatcgaggtaatagagccatttttagtagacgcgatgcggtcttgaaaatcgccgacctctttggaaagtgtggattggtaacctccagtaataggaatttttccttgtaaagaagaaacttcagaacccgcttgataaagcggaaa

SEQ ID NO: 3806 - DNA, 3864 bp, Listeria monocytogenes 4b
  misc_feature (1)..(end): n can be any nucleotide: a,g,c or t/u
ctgcatccgtgcgctggaaagaaccaaccctaatgttgaaggagaagccacggcgatgtgtatttcgcgcttattaaaaccttcaggcataaaagtaactagaatagcgcatggccttccagttggcggagacttggaatatgcggatgaagtgacgctctcaaaagcaatggaaggacgaagagaagtataatcatttgtgataaaatggaatccagaagcaataagtttggtcggaagaaaaacaagaagattggtaaactacacaaatcctatgatgcttatctgatggaattgattgaagtcacgcaagaaaagtggcacaaacaaaaagttctaatgcgtaaaagttttgaatatgatcctaatttagaatatgaggaaaagaaagcagaagctcgctatttttaccttttcaaagaagcacgtacaagacaattaaaaaacaaataaaaaaatctactaagccaaattggtttagtagatttttattttaggctaaatttctgatcttacatacattacgtctggtgcgtggctcacacgttcaccagtatttaaacgctcgacttggcgcatatctgcttctgacaattcaaaatcataaatagctgcattttctctaattcttgaaggtgtttctgattttggaataatggagatattattttgtaaatgccaacgaaggacgatttgagcaggtgattttccgtgttttttcgctaggtcaataaggatttgctcttgtaaaacgccacctcggccaagtgggctccaagcttggtgaacgatatgtagctcttctaaatagcggtgtaaaagatgattcggaaagtgcggatgcgtttcgagttgatctactactggaagcacattggcacttgtacgcaggcggtccagatgatgcgcttcaaagttacttacaccaattgcgcgaacaagtccctcgtcatataatttttccacagcgcgccaagtgtcaaaaaaagtatcttgttttggccaatggactaaatataaatcaattttgtccaattgtagttttttctgcgatttttcaaaagcccgaagcgtttcatcgtaaccttgctctgtattccacatctttgttgttacgaaaaattcatctcttttcaagccacttgacgcaaaaaagtctccaagctctttttcattatggtaaaatgaagccgtatcaaacaagcgatacccgacatccaccgcggtttccagcgcagtacgcatacgcgcttcatccgttagcttgtagaccccaaaaccatgtctaggcatttcaattccattgttcagtctgtatgtatccgagaaagaaagtgtcatttcatttacctcctactttagtttattaacttaagcataccagaaaatggagaatttctgtagaatgaaggatagaaatgcgatttttttataaattccaaaaggacgtgagtgaatgagacaaccttttcaagttttagttataccgtttattaaaacggaagcaaattatcagtttggtgttttacatagaacggatgcagatgtttggcagtttgtagctggtggaggagaagatgaagaggctatttcagagactgctaaacgtgaaagtatagaagagttgaatttggatgtcgatgttaaaatgtatagcttggattcacatgcatccatccctaattttcatttctcatttaacaaaccatatgttgttccagaatattgttttgccattgatttaacgagttgttcatatcaggttacattatctttagagcatagcgagttgcgctgggtttcttacgagtctgctgttcagttattggagtgggatagtaataaaacggcgctttatgagctaaatgaacggttgaaaaacaatgatatgaaggcaatgtaaaaaaggctgaaactcagccttttttcttaacttgggattaaactgtttagcacgtgcgcaatgccgtcttcattattggataatgtaacagagcttgctgcggcttttaattcagggacggcattttgcatagcgattcctgttcctgcatattcgaccatggtaatatcattatgtccatctccgaatgcgataacattttcagcgtgaatgcccatcggtgttaaaacggtatcaagtgctttggctttatcaatgccctgagctgtgaattcaaagtaaaaatcagctgtgaagacacaattaagtgtatctttgaaaggggccatcattgcttgataattttcttgcatataggccgggtcgccagctgtgagaattttatttagacgataatctaaaaatgcggctaaatcatctttttcacagagtttgaaattcccaccgcgagattcgtactgaacgatatttattacttcgccgcggtaaggtacgtagcagtcatatacatcattcgtgtacatataatcctctttatcaatcattactttcacttcaaattgtttcatgtgttctaaaacggcttttccttcttcaacagtaagtgcttggttgaataactcttcacttgtcgcgcaatcaactactttagcgccattgtatgaaacgagcaaaccgtgatgcttttccatttctaattgttccgcatatacgtgcattcctgtggttggtctaccagatgcgagaataagtttaacaccattctcttgcgcggtgatgagtgctttttttgtttctggtgagatttttttgtcgtcgttcaataaagtgccatcaatatctaaaataatcgcttgggttgtcatgtaagtttagctcctttttttctttattgtatcactagaaattaagaaaaaatcagatgtggcgcatattgagagctttttttcaattcgaaaggaaaatggctgtgtttttgaaaaatcattccaattcggtgttcattttttggtaattagtcgttttgtattgaatgtttttttcgtaattttgattaaaataaatggaataaagcgtatcgaaaatgcttagtaaagattggcgcgttgagaacgaagagactttgttgtaatggttctcagcggatgccatgtagattttgtgtgtggcaaattcgactaaaggattgtcttgcatagatgtaattaaaataatatcgacattgttttcggacaagattttgacgactctttgaagcgtccgactccgaccgccgtaagagacgacgatggcaatatgattttcatcgctgttggcggccgataagctttgcatataatcttcttcaggaacattgactaaaacaccgatttcctgcatttggaatttgaagttttgagcaaaaaataaatggcggaagctgcataaacatcaatggttttcgcttgaattaatttttcaccaattttgacaagttcttctggatcggcgttgtttaatgtttcatcaatggttcctttgtatatttggtttaggttggtcattatttggtagggtgtatcggattccaaaataggataatcgtaatttaaatctttttcttcatttgtttcacggagactcgaggcaatttcgattttcagttcaccgattccgtttagtcctagtttgttaattaaacggtagatagttgcagcggagacaaaggcacagtagctaattcttttcgtttgcactgtaatgtttttttcgggttcgctaaaatataattcgcaagttctttttcactattggttaaattggttagttcgcgtatttaattaaaatattcatcgtttcaaatcctaactttttagaatggaatgttttaaaaacacccattaaataaaaaatcccttagcaagtgcacttcagccactgtcggcgtgagcagctccagtgcatagcnnnaaaaaataacc

SEQ ID NO: 3807 - DNA, 5774 bp, Listeria monocytogenes 4b
  misc_feature (1)..(end): n can be any nucleotide: a,g,c or t/u
aacattcagacgacggaactcacgaatttccacatagacatgagtgggattgggatagaaaaccgccaagaaagccatctaaataaggagtgttaattatgaaaaatacagttcatgatagcgaaatattgtcttatcatgcagattttgagaattctcaattaatcatgtttgttaaggatgaagaaaacagaaaatataaagtcatatttgaggggcttttaactttctgctttgaacaccaaatgtctaatagtatcattttagacatagtaaaaggagaggttagcagctttataagtgagaagtcaattttactttctgaaggcaaaaactatttttggccactagattatgaaagtgaggacgaactactaaattatttaaacgagaaaaaattaaattattatgagttacaagcttcatatgggttaaacggttggatattatgttctcactatcatattgaattatagttattttctaagaaatatggtgagatagaaagcgggaaataaatggttttatttgaaaaaacatattatgaatcagccatagaattagaaaacaggttttggtctatagagaatcatctgaacaaaataaacacatatgctaaaccccaaaagcccctttactagcaacccacaaaccaatcatgctataattctctaaatgataacgtttatcatttaagggggaattaaacatgattgaaaaaacaattaaggaacgtcgtagcattaagaaagcgaacgacgcgccaatttcaagagaaacggtgaacaccattttagagcaagctgcctatgcgccttttcatagcaaagtagagccgtggaatgtatacgtgctgcatacacttgctgaaaaagagcgatacatcgagaaaatcatcgaatttaatgagcgcgaacaaggggttagtttttctgaagcagagattgcggatttaaaagcaggctatgcgaagaaaattattacgccgccatacttactcattgtgacgacgaatattatcggtcacgggaaaaaggatttcgaatcaatcggggcaactagtgcatttatccaaaatatccaattacttggctgggaagcgggaattgggatgatttggcggtcgaatagatttatttttgatgcgaagtttgcggaagatttaggtatcccttctgagcaaaaaattgttggaaccttgcatttaactagcttagcggaagtgccagaagcaaaaccgcgtcgtcctttgaatgaatgggtgaagaatttagccgatttgtaagattgatgtttcgtgtgattagcgttacaatgatacaagtgtaagaaataaggaggcgagcaagatggcagttccagctagacgtacgtccaaagcgaagaaaaacaagcgccgtacgcataaaggcttaacaacaccaggtttgagtcgcgatagtgaaacaggcgaataccgtatgtcacaccgcatctcaccagacggcacttataaaggtcgcacaattatcgaaaaataagaggatttgttccagtgattggaacaaattctttttttttgtgatactataatggaaagagctaaatacacaaaaaggagtctgattttgacatgacagaagaatttgtgaacaaagaagatgcgctgaaaaattataatgcaaaagagtttcgtacaccagatggctatacgagcgatatgattttaactacagtaaaagagttgaacgggaaaccaacattacatattttattaattaaacgaagccttacaaacgcagaaggaaaaccaaatatggaaggcggaaaatgggcggttccgggcggatttgtcgatgaaaatgaatctgcggaccaagctgccgcgcgtgaactagaagaagaaacaagtttgactggtattccgttgattccgtttggggtatttgataaaccgggtcgtgatccgcgcggttggattatttcgcgggcattttatgcgattgtgccaccagaagctttagagaaacgcgcggctggggatgacgcggcggatatcggccttttctcaatgacagaagctttggaactgccacttgcttttgaccatttagatatgcttaaaaaagcgtatagtgcgattacggaagagtttttactgacaacagcaattcgtgatttcttgccagaaactttctcagccgaactactttaccaaacgttagatggttgcacgaagccaggtattttgccggatgaagtagaatttatggagaatatcgagtatttaccttatttagaaaaagttggtgagttataccgatttaatgcggatgctgaagcaggaagtatttatttttaatagaaaaggagccaccgatttggttggctcctttttttataggaaatgctttttaccataacgtatgcgaaatctttaaaagccttggaagcaggcgaaatgtagtggtttttcaaacttgctagatagataaaacgatcgtgttttggttcgttgatggataatactttgacattgtagtgtgctaatgaggagatttttggcatgatagaaataccgtaatcaacactcacaagcccaaccattgcggtatcctcctctacataacagccgattttaggttgaatatttatttccgcaaaaagagaatcaataagcggtctcagcccactggtgtcagaaaagaaaatatacgaataatctgcggtgtcttttaaatcaatcgaatcatgtttggcaagtgggtggttttcggcaacgacaacaactaactcttgttttgttaatggtaaaaactcaatatcaggttcattttcgacgtaggagcaaatcgctaggtcgaatttttcattttttaaatcagggataattgatttagtggcaccttggaaaaaggaaaatgtgatgtctttatggctttcgactttggtgaaattctggacgagctctggaaccgtatgggcgcccatggtgtaaataaaccctaaatcaatatttccgtgcgatgggctcgttaattcgtgtaaaagtttttcacctttttctagttcggcgagggatttttccacataagttaaataaaagcgaccgtatttagttaaacgaatattgcggccttgtttttcaaataaatagacaccaagttctcgctcaagttctgcgatagaatggcttaagctaggctgggtaatggagagttcggcggctgcgatcgtgtaatgctctttttcagctagttttttaaaatagtataattgacgcaaattcatgaaactacctcctcggaatgccttgataactctattgtaagcgattgtatagaaaaaatctatggataaatcgaaaaatatacattagattaataattattcctgacttataatgaaagagaaataagattgtgcattattgaacgtgaataatgtaacaaatcatttgctgagattatagtcgcaggaggcttattatgacagattatccgagtatttttgaaccattaactgtaaaaagaatgaccattaaaaaccgtgtgataatgccaccaatggggacaaacctagctggattaaatggcgaatttttagaagaacatatgaattactacgaacaacgcgcaaaaggtggaacaggtctaatcactattgaaaacgcttgtgtagattttccttatgggacaaacggaacaacgcaacttcgaatcgataatgaccaatacatccctggattttacaaattaacagaacgtcttcataaacatggaacttgtgtatccatccaaatcaaccacgctggtgcatcagcttatccagcacgtttgaatggacttcaaccagtttccgcgtcagatattccatctaaaaaaggtggtactgtaccgcgcccgcttacggtagaagaaatttatgaaatcgtcaataaatatggtgatgcagctagacgtgcccaacaagctgggtttgatgcagtcgaaatccacggcggacactcgtacttactatgccaattcttatcgccactttataacaaacgtacggatgaatttggtggctcgcctgaaaatcgcgcccgtatcgtcaaactaattttggaaaaagtccgcgcggaagttggtccatttttcccaatcgtacttcgttttagtgcagatgaatttacagaaggcggcaaccacttagaagatattttggaactgctagattattgccaagaagaagcggatattttgaatgtatcagcggcaataaatgacaacctatacttgcaaattgaccaaatgaacttggaagatggctggagaagctaccttgcaaaagcggtgaaagataaatttaacaaaccaacgattacttccggtaacattcgcagtccaaaagcggcagagaaaattttgtcagaaggatatgcggacttgcttgcgatgggacgtggcttaatcgctgagcctaactgggtgaacaaagtggcaactggccaagaagacatgcttcgaaaatgtatttcttgtaatatcggttgcgcggatcaccgaatttccaagtcgaagccaatccgttgtacggtgaatcctgatattattcatgaagataaatacaaagaaacaaaagtgactcgtccgaccaatgttgtcgtaattggcggcggaacagcagggcttgaagcagcttgtacggcggctgaagttggctgtaacacaacgctaattgaagcgagtgaacaaactggtggcttggcgcgtgccattgccaaccttccagacaaaagtagaattgccgatttccctaattatttagcgaaccgagcagaaaaattaaccaatttaaaagttattacaggcactaaagctgatactgcgcttattgatacatttaatcctgatgtggtagtcaatgccacaggatccaaaccattacttccaccgattaaaggtttgcatgacgtgattgacaaagaaggcagtaaggttcattcgatttttggacttatttcaaatatcgatgactttaccgaatttagtaacaaaaaagttgcagttatcggcggtggtgcagttggacttgatgtggtcgagtacttctcagaacgcggctcggatgttacaattgtagaaatgatgccacttcttggaaaagacttagatatgattacacgtctttcgatgatggacattatcgagaagaataatgttgatgtgcaaacagaaactgcattaaccgaagtagcagcggatcatttcaaagtgaagcacgacggagtagacgccgagattccatttgattacggctttgtctgcctaggaatgcgaccagaacgcccacttatggaagaacttgcggcatacggaaaagaaaaacaaattgaaatcgtaaatattggcgacagcgctgcgacaagaaaaatcttggaaggcgttcgcgaaggaagaaatattttaactacattagaaaaaattggctctttgtaatccgaactggcaaggcggagtccgtcttgccacattcgctctttatataagttcacattttcacaaataaaccttaatttggaaaggaacgatgttattatgacaaacaaaatcacagaaagaattacaggacacacagaattaatcggtttaatcgccactccaatcagacacagtttatcaccaacaatgcataatgaagcttttgcaaaactcgggcttgattatgtataccttgcttttgaagttggagacaaagaactgaaagatgttgtacaaggattccgcgcaatgaacttacgcggctggaac

SEQ ID NO: 3808 - DNA, 3751 bp, Listeria monocytogenes 4b
  misc_feature (1)..(end): n can be any nucleotide: a,g,c or t/u
aaagggtcagtttttttctcattatactatatctattaatcgtgccagttcagcatgtttctgcacatgcttatttggaaaattcgaatccggccgatcaatctcatattcaaaccgcacccgaaaaagtaacgcttgtttttaatgaagaaattgaagcggatttccctttaatagaagtcaaagattctagtgggaaacaagtggaaaccgggaaaaccactgtttctaaaaagaataatcatatggttgaagcatctctaccgactgatttgaaagcagatgtctattctgtttcatggcgggttgtgtcagcggatggacatgcggttacggggatcatttcttttaagttaggcaatacgaaagcgacgttccaagcagcggaagttccctcaagtggagcggacttgcaaattagttcgattcaaaaagccgttttatacataggtttttcgctgtttatcggcgtacttctttttggattaggtctttatccacgaaaagaacagataacagaaaaaatttctggacgtttgaaaaaagtaacttggatagcgctagcacttctgggtgtggctctcttcatgcaacttttcgtacagacaagtatcacaacgggcgtttccatcagtgaaagttttggaccgagtaagttagctgctttcttgactacgaaaacagggtatatttggatcagtgaatttatcgtatggctgctacttgccatttttaccatcatgatgttctttaaaaagaaacaatggagctggttctcgcttttgatcgagagtgcattaatcggatatttgatttttgcgaaggctcagaatggacacgctgcagccagtgccgataaaatagtaagtatcaccgctgatatgcttcatatgattgcggcaagcgtttgggttggcgggattttagtgcttttattcgtattacctcggactgggaaagcgcgcgaagtttggagccgctttgcgattgtagcaatcattgcagtcgcctccatcttagtcagcggcctattaatggcagtgatgaacctcggtcaaatggccaatttatttacaaccaattacggtaaaatacttcttttcaaaattggtttatttttactaatggcactactagggctaggtcattacatttatatcaaactcaaaaaccaacgattgccatttaaaaccattttgatggaacttatcattgggacgattatccttgttgtcgcaagtgtgttaaccaacgtacaaacaccgccaccgcctgctccgaaagcatttgatgaaacaattgcagcagaaggcgaaaaagcaaaaatcaatttacgagtggaaccagcgaccgttggacaaaaccagtttatcatcacttttacttcagcagatggttctgccaaaacagattttgaacaagtgacgattacaacaaaatctactaaaacagatgaaaaatcaactttccaagccaaacttgcaaatgatacgcaatactttgcggaagggctatatattaatcaaaccggcaagtgggaaattacggttcatggtttaacaaaagatttcacagatataaatcaaacatttacaaccaatattacacagtaaaggggaaaaataatgaaaaaaattatcagctccatcgtcgttttattagctgtctttatcattccgtttcaagcgagcgcacatgtttctgtattaccgagcgaatcgaccgtagactcctgggaaacctacacaatgaaagtaccgtcagaaaaagatgtcgcctctaaaaaaatcgttttaaaagtagaaaaaggcgtatcattcgaatcttatgaaccagtgccaggctggacaacgacagtagataagaaaaatggcacagtaacatggcaaacagaaggcaacggaattgaaaaaggccaattccagcgctttagttttatcgctaaaaatccaagtgaagaaggcgaaattgcttggaatgcctatcaatattatgaagatggctccatcgttgaatgggttggcgcagaagattccgagacaccacatgctaccacaaaaattgtcaaagagtcttccaaatccgcaactggctcgcacggagaagtagttgcgggagcggagaacacagcaggggatacaagcagtactggagataatacgattttattatggaccgcagtagctatcagcgttattgcacttatcacggggattcttgctattttaagccgaaaaaaataacttcaaaggagtaagcagatggaacggaaaatcatgcatttagctgtaggtaagccgaaagaacttaacctttcaaataacaaacggatgatgacgggaatcgaaaaaaagcttgtacaatccgccagtctaaccactaccggttttgaaaatgacgcaccgcataatttgaaatatcacggtggtccggatcgtacggtttgtatttatccatacgaacattacgcgaaatgggcagcaatgtttggcgaagagctacaagtaactgcttttggtgaaaatctcatcactacgaatatgttggaaagttctgttcaaattggcgataaatttcagattggcgaaaccgttatccaaataacggaagcccgaaatccatgtagtacaattgaaaagttcaatggaatccccaatctctataaagcaattcacaaaactggacttactggatacctatgccgaacgattactcctggcattatacatgcaacggatgaaatcaaacaaattcaccaagaatcacacggcgtaacagtagccttttgccacgataaagttttgcataaaaatgggacaaaagaagacttagaacgcattttggcggtagaagccttatctgaacgttaccgtaaccaagtcgaaaaacaaataaaaaagtgatagcatcattcgctatcactttttatattttcatcagccagttctttttttcgtagtgccaaaaattgctctacgaccgcaatttcttctttggttaaatctggcgtatctgcaattaattgggtaatcttgcttgctctttgtgtgctagaagtagtagctttcttagcgcggaaaaagttcgttatcgtactagttatcatcccgataaacgctatcccaaacaacatcataatcgatgccaaaatccgcccaatcggagtgactggaacgatatcaccgtacccaactgttgtcgcagtcacaatcgcccaccaaagcgcatcaggataattgtttatttcaggttcgataaataccatcggaacaggaattataattacaagtaaaacaaaaatcattaaaaatcgatttaaaccattagaacggaaaaagctataaatcggtacaatataccgtctccccatcgcagtaatacttaatagatggacaaaactaacaatccgagccgctctaaatccaccgtaaaatggaatgattgcaatgagttgaaacggatgcgtttttacataatgccatttattatcagcacgataaagtcgaaccagataatctagcgtaaaaatcacccaaataatccaatttaaaataaatgtaaagctgtttctgtacggtaatagggcaagggaaagcactatgagaataagcataaaagtctcataaatcatttttctctttgttttatccaagttatccacctcgtttgacttatactctcacttattttagcataaaacgacgcaaaagccgtaaacaaataaaaaagctgacaacaaaaagttgccagc

SEQ ID NO: 3809 - DNA, 6411 bp, Listeria monocytogenes 4b
  misc_feature (1)..(end): n can be any nucleotide: a,g,c or t/u
taaaactaaaaaatcaacaaatcgaagttcggcccaggttttccaaaatgatagaaaaaactttaattctgtaatattgtttaagagcttcgacttttgcgttaaactatatttcaattcatcaatatagggcgtaaaaatcagcgtttgttcgatggcaccactttcaatatgctttgaaataaaagggggccactttctcaacattttcaacttccctttcaaaaaagcgtcactgtcttctgcggaaaaatgttcctttgaattagggctaatctgactatccccaactagttcaatcgttattcgccggctatctttctgcaaattctcaagcaacagcattgtttcccgaaaatataattgttgaaaggaaattttaacaataaagtgctgattgggataaacttgtagaacttttttaacttccatttcataccaattgataaattttccatactctgtttgatttgtaacacataacaaatgcgtagttagatcttccaagagatttttagtttttttaatagcaactatttcttttttgactaaatcaccacttttagtatcatactcattttgaagtagtaattgatatttttgatttaatataaaaatctctcctttccaaaaaagcatgtgaaaattagtacattccaaataatacaacatatgtcccataaaactcatttggtcttatatataagaccaaaaaaagataccctattacgggtacctgctttactttaaactatttggatattctctttttctaaaaactgttgaagtaatgtattataaagttgtgcaagggatttgtaatccagtacatctaaaattcgaatggcacttttagactcttttaagccttgttcgacctggtcatttttcatccagattaagccttgatagtaattatgcataatccggtaaaaagcacagtcatgcgtagaagacagttcgcgcagtatttctaataattgcgcggcatattctaattgattacgggtaattagttcttcaattatattggatagaagcgtggaaaatacttttttgccacgatcgtaatgtttatatttttcgagtgacttcaagaccaattgaaaaaaataaatttgtacatcttcttcaaaatagtccactgaattagcgaaaatccgaatttcttctagtgtccatgattggactttccacaaatacgtttggataactgctttatctttctcagaaacaatactaacgtcaaatcgattatttaatagaaattgttcattaatttccattcttgagtggacaattgcttttcttagattggctctatctcctgtttgctgcaacacttcttggtataattcttgtaagtctgccaaacttttttgattagctgcatttgcaaatttgtaccaaaaattgtcttcctccgctaaagaataacctctattcataaagaaaaattcatccgaacttagcattactcgttctaaaatttcttcaaatagtactaatgtaatatcatgttttcctttttcaaaacctattgcatatgattttgaaattacccctgtataaacttctttttgcgtcaatccttttgaaagtcgtacttcgcgaattaactcaccatacgcaaccattgatatcgtctcctatatatcagtttcagaaaataaggttatcttgtatgtacaatattaatcttgtaatccccaatattcgctttagtagtttaacgcttttactctaaaaatgaaacttacaaaaatgtcacttacgggtattaccacataaaaaaatccacccatagtaatatatgagtggatttcacttaattttcgacactactcgtctccatgttaaaaatcgtgatagcttctgataaagcagaaatttctgcctctagtaccgatttttgtttttttaattcatacatttgtaaaatattggtagcttcgtttaaatctatattttctgtgttataaaatttaatccatcttgtaagagatgctattgagacaccaaaatcattacatagcgtatactttggtgttccatggtgatacaaatagactagactttttttgaatttttcattatataattttttaggcatgaacagttcctttcctgtgcgtttttcagagtttagtaatgtctcagataactgttaaatactgtttgatttcaaagttcactgctggctttatttcccagcaaatggactattccgccattttcaaggtgcagattacttttaatacatcccgtgattccgatataacttagtaactctttctttttttcattttatataataatttttcttttgaatcgcttagcaaattcttttacaatttattgtccctccctttaaattttagtaaatatagatgctaatatataggatttccttgatgttatctctatatttccaactcgatatctaaattatataagacaaagcaccatgtttactactctaaaaagcacttttaaaatgtgtttttttcttaaaagtggctaatttgtgacaaaactttgctcatttcaaatgaataaaactaattaattcccgtgaacctaccatcactaactaattttatcgttttcattatacattttataatggcgctccagcttgaaatttaattttctaaaataactgttagattaagataaatactaaactggtaacatgtaaaagtgtctaactgaaacttcattttatggtacaataagctacaatatacatagaaaagaggggcgccatggaatttctacttattttacttccagtttttgggatcttcgctattgggtttattggacaaaagactttaaaatttgatattcctaacttatctaaactcacgctttacttaatgtcaccgtttcttgcatttaatactttttataccaatgcgctaacgatagattatgcatatttggcgatttacatttttgcgctttgtctgagtttgattttgcttgtcagtttaattagttttttgcttggttataacttgcaagatcgttgcgcgctcattttggctagtgcttttatgaataatggaaattatggaacacctgttgtcttgcttgtttttggggctgttgggcttgatattgctgttgtattaatggtgttgcagcaactagctatgagtaccattgggatttattttgccgcaaaaggaagtaaagatgcaaatggaatgaaaacggtcatgaaacgggttgttcggatgccgattgcttacggggctttactcgggcttacgcttcaattacttcatgtttcacttccatccgctttaatgacttgcgtaaaacttgttggcgacgctgctattccaacaattatgattgtccttggaatgcagttggcagttatttcgtttagacgaatcgaacttacaaaagtaggcattgcattagtactcaaattactcattgctccaatcattgcgtttggtttaacgttgattctccctgttgacgaaatgacaaaacaaattatgattttacttgcagctatgccaactgcagcgaatactactttaatggctgtgcaatttgatacaaaaccagatttagtttctagtgccacatttattagtacagttttaagtattattaccttacccattgtgctctattttcttcatccagttttctaaggcgggctctagctcgtcttttttgtatagaccaattataaaacaaaacgtttgccttgcttacatttaagaaatataatagctataccaattgaaaaaggaggtactggactggtgaaaactattgatatgaaatatttacgcttgttagcaaaagaatatcctactattgccaagacagctacggaaatcattaatctcgaagcaattatgaaccttccaaaaggaacggaacattttttaagtgatgttcacggtgaatatagtgcttttgaacaagtgcttcgtaatggttctggtgttgtaaaacggaaaattcgtgatatttttggcgcggagctagatgatgcagagattaattcacttagtacactgatttattatccagaagaaaagatggatttgcttgctagtgaaacagaagatttgcaggcttggtatcgcaccacactttttcgtttgattgaactctgccagtacgttgcttcaaaatacacacgttctaaagtgagaaaagccatgcccgaagattttgcctacatattagaagagttacttcatgaaaactacaatgaagacgacaaaaagctttattatgaagaaattttacaacatattatttcacttggtcgtgcagaagaatttattagtgctctctcgttacttattcaacaattggtcgtggatcatttgcacattgttggtgatgtctatgatcgtggtccttatccagataaaatcatggatacattaatgaattaccattcgctcgatttccagtggggtaatcacgatattttatggatgggcgcggctagtggttctagggtttgtgcggctaatgttattcggatttctgcccgttatttaaatttagatattttagaagatagttacggtatttctcttcgccccctggccctttttgccgacgaagtgtacaaagacgatccttgtacctacttccagcccaaaaacgaagaaaatattaactatagtaatgcagaaatcacgcaaattgctaggatgcataaggctatctcgattattcagtttaaattggaaggtgaaattataaatcgacgcaaagaatttgatatggatcaccgacttttacttcaatttatcgattataaaaaaggcacaattcatctaaagggaaaagaatacctgttgttagacagtcattttccaacgattaatccagaaaaaccttatgaactcactgacgcggagagagaacttattgggaaaattactgccgcttttaaaaactgtcgtcgattgcaaaaacatgtacaatttctatattcaaaaggcagcatgtttttaacttataatggtaatttactctaccatggctgcattccactccacgaagatgggacttttatggaaatgaaattacgtggcgaaaaatatgctggtcgttcgcttttagagcagtttgaaatacttacccgcgaagcatacgtacgtccaactggaactaaagaaaagaaatatgcgtgtgatatcgtttggtatttgtggactggtgccatttcttcgctatttggaaaaagtgaaatgactacatttgaacgttattttgttgcagaaaaagaaacacacacagaagaaaaaaatccttactacaaattgcgtaataacgaattaatttgcaaacaaattttagaagaatttgggcttgatggtgaatgcgggcatatcattaacggccatacgccagtcaaagaaggaaaaggtgaaagtccgattaaagcgaatggtaaaatgctcgtcatcgatggcgggttcgcaaaggcctatcataaagaaacgaacttagcgggttatacactactttttaatagttacggtttacaattagtgagtcatcagccatttactacaaaagaggatgctatcaaaaatgaaacggatattctttccacgcgtcaagttattgaaatggaaattaaccgtaaacgtgtaagggataccgatattggggctaaacttagtgagcaggcagaagatttaaaattgttactagatgcctatcgtaatggcttgcttcatgaaaaccgttaactaataggtttttaattgtcataaaactttcacaagtcccaaaaagcttgggctgcaacaactaacacttatatgaaaacttatctcttcatttttctagtgcatcttctgagaaaaaaagttatatttaaatagtagttatttctttataactctcataagagaatatctattcattcccacatcgcttctgattcccacagatcaaaagcaaaaaagtaggcctagcatcagctaggcctactttttttatttaccttgctcccgcgctaatcttcttgcttcacgtgctgctttccttgctgctcgctcatcatcaacgggcgctttcacatcttcagttgcttcttttttcttccatattttctctaaatcaagcccagccatcgtcgcatagcgtttaaagcgtttttctgcatctaaacgggttttttcggatagttttgttgcaacatctggatttgctttgtaaagcgctgagtatcgtgtttcgcgttttaggaagtcttcgaattgattgaaatcgacttttttataatccattgtcattggattttttcctttttcttctagtgccggattataacggtacaagctccagtagccacattctactgctntttgcgtttcacttagcatcgttttcataccgctt

SEQ ID NO: 3810 - DNA, 4556 bp, Listeria monocytogenes 4b
  misc_feature (1)..(end): n can be any nucleotide: a,g,c or t/u
tggtattgagaactattctagacatttatcccttcgtccagcgggagttacaccatacacgttactcgattacttcccagacgatttccaaatggtaattgatgagtcacacgttacgatgccacaaatccgtggtatgtttaacggtgaccaagccagaaaacaaatgctagttgatcatggttttagactaccaagtgctttagataaccgtccgctaagattagaagaatttgaaaaacatatcaatcaaattatgttcatttccgccacaccaggcccttatgaactagaaaaaaatccggatgtcattgaacaaatcatccgaccaaccggtttgctagatccaatcgtagaaattcgcccgattcaaggacaaatcgatgacttaatggatgagattaatgatcgtgtcgagaaaaacgaacgtgttttaatcaccactttaacgaaaaaaatgtcagaggatttgaccaattatctcaaagaagctggtgttaaagtacaatatctccactcggaagtgaagacgttagagcgaatcgaaatcattcgcgacctccgacttggtgtgtatgatgttatcgttggaattaatttacttcgcgaaggaatcgatttacctgaagtatctcttgtcgctattttagatgcggacaaagaaggattccttcgttccgagcgttccttaattcaaacaatgggtcgagccgctcgtaatgaaaacggtcgagtaatcatgtatgctgataaaatgaccgattcgatgcgcaattctattggcgaaacagaacgccgtcgtaaaatccaaattgaatataatgaaaaacatggcattacgccaaaaacaatcaaaaaagaaattcgtggtatcatcgcagcgacttctgccgcagatgaaagagaagcagtgaagcaacatgatttaagcaaaatgtctaagaaagaacgcgatgtgttcattgaaggtatggaacatgaaatgaaagaagcagccaaagcacttgatttcgaacgtgctgctgaacttcgcgatgctttactggaaataaaagcggaaggatgaagcgaaattggataaagagaaaatagtaattcagggtgcaagagcccataacttaaaaaacattgatgtagagattcctagagacaaattagtagttatgactggactttcaggttcaggtaaatcttcgcttgcttttgatacgatttacgcagaaggacaaagacgttatgtagagtctttgtccgcatatgcgcgccaatttttaggccaaatggataaaccagatgtagatttaattgaaggattaagccctgccatttcgattgatcaaaaaacaacaagccgtaatccacgttcaactgttggtactgtcacagaaatccatgactatttgcgcttactttatgctcgtgttgggcatccagtttgtccaaatcacggcattgaaatcacttcccaaacaatcgaacaaatggtagatcgtgttctagaatacccagaaaaaacacgcattcaaataatggctccgatcgtttctggtaaaaaaggaacccataagaaaactattgaggaaataaaaaaagaaggctatgttcgaattcgtgttgatggagaaatttatgatatcaatgacgaaattgaaatcgagaagaataaaaagcattctattgaaatcattattgatcgcattgtgattaaagaaggtatcaatactcgtttgtatgactccattgaagcggctcttcgtttagctgatggttatgcggttgttgatataatgggcgataaagaattattatttagtgaacactatgcgtgcccttattgtggtttttccgttggtgaattagaaccaagaatgttctctttcaatagcccatttggcgcttgtccaacatgtgatggacttggcactaaacttgaagtcgatgtcgacacagttattccagatagaagtctgtctctaaatgaaggtgctattattccttggcgcccaattagctcgcaatactatccacaaatgctagcttcggcttgtaaagagttcggaatagatatggatacacctttggagaaactaacgaaagaagaattagatattattttaaatggatcaaaagacaaagaattctacttcgaatacaaaaatgatttcggaatgacacgcgaaacgtggattccttttgaagggatacttccaaatatcgaacgccgctatcgtgagacaaattccgactttacgcgtgatcaaatggcgcaatatatgactgatttaccatgtccatcttgtaaaggttatcgtctaaaagaagaaacactttctgttaaagtaaacaatcatcatattggccaaatcagtgagttttctattaatgaagcactagatttctttgatggcttagaactctctgaaaaagaaacacaaattgcagcgccgattttcaaagaagttcgtgctagactaggcttcttaaaaaatgttgggctcgactatctaacaatgagccgtgcagctgggacgctatctggtggtgaggcgcagcgaattcgacttgctacacaaatcggttccagacttactggggtactttatattctagatgaaccttccatcggtcttcatcaacgagataatgaccgtttaatcagcacactccaaagtatgcgtgacattggaaacacgcttattgtcgttgagcatgacgaagatacgatgatggccgcagattatcttattgatattggtccaggtgcaggggaacacggtggacgaattgttgcagccggaactccagaagaagttgccaaaaataaaaattccatcactggtgactatctttcaggtaaaaaatttattccagttcctgctaaacgtagaaaaggtaacggactagaattagaaattattggtgctaaagcaaataatctcaaaaacgtaaatgcaaaaattccactagctactttttcttgtgtaactggagtttcaggttcaggtaaaagttcgctagtgaatgaagtattacgaaaagcattagcgagaaaactaaatagaaaccacgcaaaaccaggtgaacataaagaaataaaaggtatcgaaaacctagaaaaaatcatcaatatagatcaatcaccaatcggaagaacaccgagatcgaatccagctacttatacaggggctttcgatgatattcgtgacctttttgcaagcacaaatgaagccaaagttcgcggttataaaaaaggtcgctttagttttaacgtaaaaggtggacgttgtgaggcgtgtaaaggcgacggaatcatcaaaattgaaatgcatttcttgcccgatgtatatgtaccctgtgaagtttgtcatggaaaacgatacaatggcgaaacgttagatattcgttacaaaggcaaaaatattgctgaagtattagagatgactgtagaagaaggcctagaatatttcactaaccaaccgagaattgcacgtaaactgcaaacgattgtggatgttggacttggttatattcgacttgggcaacctgctacgactctttctggtggtgaagcacagcgtgttaagctagcttcggaacttcacaagcgtagtaacggaaaatctttctatattcttgatgaaccaaccactggtctccacgcagatgatattggtcgtttactcaaagtattacaaagacttgtagaagaaaatggcgacacagtacttgttattgagcataaccttgacgtaattaaacaagcggattacttgattgatttaggaccagaaggcggcgatggtggcggtcaaattattgcaaccggcacacctgaaaaaatcgctcgctcgaaaaaatcatatacaggtaaatacttgaaaccaattttagaacgcgataaagaacgcacagaagaacgaatcgcaacagccaagaaaaaataatcaaaaccccgcttatgcaaaatataagcggggtttttaatagtccttaagaacaaaccacccaaagtccaaacaaataatcatcctctggttgtatgacagaaattatattttccttcataatagagtcatagataaaacagatatgtcacttgcatgtgaaagcaagcctaaaatagtttagcctaaattataggaggaaatgaaaatggaaaatgaacgtaaacgtattctcgaattagtaaaacaaggtattatatccactgaagaagcccttactctacttgaaaatatttccaaaaaagaaggtaaaacagcagcaaaagaaaatattcgtcggtctgcggctccgagagaagaagaacaagtcgaagaagaaacaaaagaagaaccatcatacgattacagtaaaggttggaacaatcaaggaaacccttatacacctccaaaaagtcgtaaaagacgcccagaaccgactccagaaaatcatgaaagagacgaagaagagggcggcgaaaattcttctaaagatcgtgaagactccatgcgcaatatggttaatgatttatcccaagcgggtgaaaatcggttctttcctaaatagtgcattta

SEQ ID NO: 3811 - DNA, 3955 bp, Listeria monocytogenes 4b
  misc_feature (1)..(end): n can be any nucleotide: a,g,c or t/u
ttattgctccaattcttgttgccttatcttcatttatcgtcgtaacaccgattgcaacgaccttccttccagaaggcgcatcaaaatcaatcgaagtaccgaacgttatcccagttagttatactggcgcgtcaggcatgttcgtcggtattatcgttggtttaattgcaaccgatttattcattaaattatcgaaaaacaaacgtatgcaaatcaatttaacaggaaatattccaccggcagttattaaatcatttaacgtgttaattccgattatgattacggttattattttctcagttatgtcatttgccgttaaccaaattttcagcatggactttaatacacttgtgacaacgattatcacgaagccgcttagctatgtgacgacaagtcttccagggttcttgctgattacttctatcgctaacttattcttcggtttggggattcatcaagcagttatttctggtccgttactagatccatttttacttcaaaatatgcaagaaaacatggtagcctacgcgaatcatcaagaaattccgcatattattaacatggctttcaaagacacatttgcggttatgggtggctcaggaaacacgattggcttattaattgccattttcatctttgggaaacgaaaagattacaaagatatctcgaaactatctgcggcaccatcactatttaacatcagtgagccaatcatctttggtctgccgattgtgttcaacccgttacttattatcccgttcgtattagcgccaattttctccttaacaacagcgtattttgcgacagcagcaggttggattaatcatgtagtcgtacaaacaccgtggacgacaccgccgattatttctggtttcctagcaactggcggggactggcgcgcgtccgttttacaagtaattatcattgttgtgacggtctttatctatctgccgttcctacgtatggatgaaaaagttgcttttgctacagctcaaaaaacagaagcaaaataaggaaggaagtttaaccaatgaaaaacattttattagtatgtaatgctggtatgtccacaagtttcttagtagaaaaaatgaaagcagcaggcgcggaacaaggcgttgaagcaaatatctgggctgtatccgacgctgaactacacgaaaactgggaaaaagcagatgtcattttgcttggaccacaagttggttatttaaaagggaacacagaaaaagtagttggcggaaaaattcctgtcgaagtaattaatatgctagactacggccgtgtcaatggagcggcggtacttgaaagagcaatcgaattaatcggttaaaaaagtaagggagtgtggcttatagtcgcactccttttttatcggggaagaaagtgttataatgtgtgaaaaggagcggaattattatgaaatatgtaaaatcacaaatgaaagagcttgtaaaagatagcgtagacttgcaagaacgccttcaaaagctaatgaaagaaatggacttagaaaaaactttcgctttaaaagcactttatcattcagaagtagctgatggtggaccgtaccaaacagcttatcaagatttggattataaatataaagattaacatcaaatggctctgctaaacaattagcagagccatttttagatatattttccttggatttcctttaagtagtcaacaaaattatcgtaaaagtcatcacggttttgaatggttacatgcgttccaagttggagcaaaaagcggtacccagcctcgtgatcaggaagcgtcacttttgccaaaaagtgtgcgtcatcttgctgcgagatttcgactagatcaaagcgctcgatgatttgctcgcgggcaattttatcgacaattaagttgacttcatgcatcaaaaacatcggtctgtcgggtggggcgccaaacggttttacactaaaagggcgagcttcaaacgtttcttctagcgtttttagttcaacaatccgcgacattttaaatgttcgaaaatcgctgcgttccaaactgtaaccttgcaaataccaagaacgattcctaaacaggaggtgataaggctcagttttacgaatggtttggttgcccgttcgatcaatatagctgagttctacgagttgatgttttttaatcgctaaatataaactttcgactttagcgtttaattcgtttttcatggacaaattggagaaatcgagcgaaatggaacttttaggcggttcgcttgaatggtcgagcatgtttttcattttttggagggttttcttggtttcggcggaagaaagcaactgttccattccgtccaaactagcaataatcgcggttaaatcatccgctgtgagaagctttttatcgactttgtaggtaggcataataccaatgccaccctttgttccggcaattgtgtaaatcgggatattcgccatcgcgagtgtgtcaatgtcgcggaaaatagtacgtttggaaacctcgaacattgtagccatttcagaagcactgactagctcgcgttggagaagcagcatgataattccgatgagtcgctcgattttcatttttttctcctttgtttttggaatgatgacagacagttgtcatcattcgtgtgttatagttacatcatatcaaagttaagtaactttttggagggaaatattatggcatttgaaattgttgaattaaaaaaagaaacatttactggaaataaagtagaaatccctgaatttgatccacaaaaaggctttggcccaatgagcgaaattaaagaatcagcccacacaaaatttgcaaaaaacgaaaaagactacgttggcattaacgcaagtcttgacgacctacaatattacatcgtagctagtgcaaacagtgaaaacggcgacacaactttcgacattccagcaggcaaatacgcaaaattcgtaacaagcgaaacagaccgcccggctctagacggcttcatcggcgcagcatacggcgaggttagtcaaagcgatacggttggcattgcgggatcgtttaatttggaggatcttagagaagctgagtttacgctttatattccggttgttagtaagtaaattgaggagatctctttcggatgaaaggggtctttttttatgttaataattaaaaaaatcaaaaatgcactaataagttctgcatttgagtatgttattgcacagaggttcacaaaacgctcacaaaagggatgtagttgcgatgctataatagaagagtggaaaactacaaattactgaatgatgatcttcaccttaaaaataggagtgacgatagattgaaaaaactagattttaactgcaatgatgctaattataatgcagaatttttaatgaaaatattaaccactttaaaagatattaccaaagttaagcagtttactattgaaatgatagatgcagttccaaatgatcaagagcaattcaaggaagaaaaagggctatttagcgaagaagtttttgattttaataatttagtgaaagaatcacacggtatcaatgtagattttaaagaaataataaatatattaaaacaatgtcgaactgtttgggaacttagtatattggttgttacatctgagaatgaattgaatgatagcggaaaagtcttgtgtgaagtggagcttatagagggagatttattcacaattctttatagtgaagactttcctattgatttgtttttagaagaatttagtactgatgaaattactatagaggactaaataggagaggaagttaaagaaaaaatgttgtattaggggataaaacaaagaaaatgttgaatgaattataaagtataaacggagaaataatatgaatagatataaaatcttaggtgaatataaagactggtgcgagatttataaagatggaaccgtcattcataacggttcatctttagggaatgtaagccaagt

SEQ ID NO: 3812 - DNA, 4318 bp, Listeria monocytogenes 4b
  misc_feature (1)..(end): n can be any nucleotide: a,g,c or t/u
gggagaaaactgcaatcttgattgtgttcgatattaagaacatcgctgttagtaacaacccaatgcttagtataataccagcatatcgtccccatttcaaggtatcaaacaatttatcgactgttttctcaccatattctacattatctacgtactgtaatttttctacttttttagcaatagtctttgtttgtgtgggctctttagcctctacaacaaacacatcgtatagtggattatcttgtttaaacaattcgaagtttttgccgtacgcaccaactaatttcttcaattcgtcatccttagaagaaaagctgacactatcaactccatcaatcttctcaatgtttttctcaagttcttgctgctgtttcttgtctgcgcttagagaaatatgtacgttaatttgtacattgttttctacatccgttgcaagcttgttcatgttgatcaatattgcaaaaaacacgctgactaagataagtgttactgttactgcactcgctgctgcaaaggtcatccaaccattccggtaaaggctcttaaaactttctcttatatgtcttcctacagtcctaaatttcatagccatattctccttgctgctcatctcgaacaattcttccattctcgatagcgactacccggtgtttcaatgtgttaacaatttctttgttgtgggttgccatcacgatggttgttccgcgattgcttatttcttcaaggatattcatgatttcccatgaagtatcaggatctaggttaccggtcggttcatctgctattaatactttaggcatatttgcaatggagcgggcaatggatatccgctgttgctcaccaccagaaagttcatccggcaacattcttactttatgcttaaggttgactaaatctagtacttccataacacgttctttaattacggatggctctgtttcaaccacttccatcgcataagcaatgttttcataaactgttttgctttgaagtaatttgtaatcttggaataccacgcctacgttacgacgaagatatgggatttcacgatttttcatattaatcaaatcaaatttgtctacgatgattttgccttttgtcgctcgttcttctctgtaaatcattttgatgaaggtagatttaccagcaccactcgggcctactacataaacaaattccccttcgccaatgttaatgttgagtccattggcagctgttatgccgttagggtatttcttataaacatcttccattaatatcattttatcaccttactatgcctttctactgagttacattttaggtaatgcatggtaaccatgaagatgagttgtttgtaggtacgaatttaaactcacaacataagcttaattataccatgacagtttttcatctataggttaattgcattacaattatatttcagggtgtgacaatatctcgattattgtaataggaaatacgattattacgttgatttccaatttatatatatgtctgcggtctagtgttattaagacaaaataaaaaagaacccacattggtcttttctactgctaacattgtaacttgtttttaccctaaataacattacaggtacattaaaaatcattacagttctagctagcggaatagaccaatctagttaaaatagctcgaggtctgcaactaggctaaactcgcctgtcatcaaattgtcaaaaagcgggcctgaaaacttaaaaaaagtaccatttcctgactaaaaaagttaggaaatggtacttttttatgaagtaaaaccttcacccattacttcacttgcgctcattacaaccacaaaagcctctgggtctatttcttttataacttcttttaaccttgaaaattcactttgcgcaatcacacataataaaatttgcttgtcatcctctgtatatccaccttttgcggagagccgagtaatgcctcggtcaattttaaacagaattgcttggcggattgcttcttgattttcagaaataataaagactgttttggattgatttaaaccaacttgcaccaaatcaattgttttacttgtagcgaataatccgacaagtgcgtacagccctgattcaatgtcaaaaacaaacattgccgaaataacaacgaatccatcaatcaaagccacacaaattcccaatgttagatgagaatacttatgcaaaatttgtgcagcgacatccgtgccaccagtagatgctttgcctcgaaaaacgattccaagtcccattcctacaagtacgccgccaaacaaagcagctacaagaggttcatgcgtccatggctccaagccttgcgttaaatacacaaagaacggtaaaagcatcgtgccgacaaaagttttcaacccgaattgatagcctaaaaagaataatcccgctagaaataaaggaatattaaatgcccactgaataaaagcaggattccaacctgttaaatagttaatgatcgtacttatcccgctcactccgccagaagcaacgtgattcgggagtagtaaaacattaaaagcaagtgcgatgagagctgcacctataatgacataaatatactcaattaatttagaaacaactggggataacggttgtttctttcttttatttgccatctcttttatccaatcctagaacgcaaatatgcattgataaattcatctaagtctccatccattaccgcttgaatattaccggtttcgtaatttgtgcgatgatctttcaccatggagtaagggtggaaaacataggaacgaatttggcttccccaaccaatttctttttgttctcctcgaatttctgctagctcgcgttctttttcctcttgttctttttggtataattttgtttttaacattttcattgcctgttcacggtttttaagctgagaacgctcagattggcacgttacaacgatgccggatggaatatgtgtcatcctaacagctgagtcagttgtattgatatgttgtccacctgcaccagttgcgcggtacgtatcaattttcaagtcttctgtacgtacttcaatttcaatatcatcatctaattcaggcattacatccacggaaacgaatgatgtatgacgtctgccggatgagtcaaatggcgaaatacgcactagacgatgtacccctttttccgcttttaaatagccgtaagcattgtggccttttataagtaacgtgacactttttattccagcttcgtcccctgcttggtaatcaagcatctctactttaaagcctttcttctcagaccaacgttgatacatacgaagtaacatcgaaccccagtcttgtgattctgtaccaccagcacctggatgaagttctaaaatagcattatttttgtcatatggatcacttagcatcagttttaattcaaactcactaatagtcgccatgtaagctttaatatctttttctaattcttcttgtaaatcttcatctgcttcttcttttaataattctagactaatttccatactttcttgttcttcttctagcgcatgaaaagcttggtatgtttctttatatccgtttgactcattaattactttctgtgccgcttgttggtcattccaaaaattcggatctaacatttggtcttctagctcagcgattcgaacttccatactgtctaagtcaaagagaccccctaaagtctttgatttgctgcgctgttttttctaattcattacgaatttctgctaattccattctaattccaccttttttaaatttacttataaactttcatagcaaaaagcgccgtctttcaggcgctttttaaattgtttcaatctatgcttctttaccgtgacaatttttatattttttgccgctaccacatgggcatggatcattacgtccaatgtgttgatctttgcggattggttggcgtttcgcttctggtttaccttcagcaggattaattgcttcccctttggcaacttgctcacgttcaaggttttggcgaatttctgctttcataatataacgagaaacatcttcatcaatggacgataccattgcttcaaacatttcaaagccttctgattgatactcacgaagcggatcaatttgaccgtacgcacgtaaatgaataccgtcacgtaaatgatccatggcatcaatatgatcaacccatttagtatcaacaacacgaagcaatactactttttcgaattcgttaaattcttctggaggtagtagtgtttctttttcgtcgtaagccgctttgattttatctaaaattagattttgaatatcttcgcttaatctattttgtagatcttc

SEQ ID NO: 3813 - DNA, 6868 bp, Listeria monocytogenes 4b
  misc_feature (1)..(end): n can be any nucleotide: a,g,c or t/u
gctcggaaagaataattaatgacgaaatgaaagaaaaaacgcaaaccaagcagtttagctctatttttggtataatagaagatgtgaatgtaaaaggagagataagcatatgaatactaaattgcctcttgatttatttaatcaagcgaaacgtagcgcaagccaagatcaaccggctctatttagctgggtaactgagttagatgaattagtgtctccagtcaaattgtttaaaaaagctggcacggcttttaaaggtgagcgttttttctggcaaaatccagaaatgacactgaccatgaccggttttggtgtaacgaaacaatttttggcggagaagaaaaaagatgcttttcttggactgcaagagaaaattgagaagagactgcgaactagtgtaaccaatgcaaccgtagatgctactggaccaatttactttggtggttttgcctttgatcctgagcgtgatacagagaaagaatggcaaagttttaaagatggcttgttttatttaccactatttatgttaacgaataaagatggtaaaagttacttaaccgttaatttgtctatctactctgatgatacggaaagcaaattagaagctgtttttaatcaatggcaaaaaatcattcatcaagaggttaatgaagctgaaatggcattacttacagattttaaggagattggcaaagaccatttcctagaaactgcgagtgaaattatcgatatgattaatcattcagaagatgtaaaaaaagtggttctagctagacgaatgggcttgcgtttccagcgccaagtagatagtgccattattttggaaaatatgctagcaacacaagaaaatagttatttcttccttattgaaaagggaacaggggtctttttcggggcaactcctgaaagattacttgcggtcaatggggatgaaattcattcgtcatgtgtagctggttctacggagcgcggcgctaccgaagaagcggacgaagcacttggaaatgcgctgttaaaagatgcgaaaaacttgcgagagcattcttatgtagtgcaaatgatggaagaaacattaaaaccatttacaacaggattgtcgttatctagccaaccagtacttctgaaaaatcgtgatattcaacatctatatatgaatattaccgcgaagaaaaaaccagatgtttccatgcttgaaatggtaaaagctcttcatccaacgccagctcttggcggtttacctcaaaaaatgggattagccattattcggatgaaagaagaaatggatcgtggtttctacggagcaccgattggctgggttgacttaaaaggttctggtgagtttgctgtggccattcgttcaggcttaattgtcgattcgcaggggttaatctatgctggttgcgggattgttggagattctgtaccaaaagaagaattacaagaaacggcagtaaaattccagccgatgttacgcgtattaggaggcataaagaaatgacaaaccacgaacaagtgctgacagattatttagctgcatttattgaggagcttgtgcaagccggtgtgaaagaagcaattattagcccgggttcacgttccactccgcttgcactgatgatggcagagcatccgattttgaagatttatgtggatgttgacgaacgctcggctggcttttttgctttaggtctagcgaaagcatcgaaacgtccagttgttctactttgtacttcaggaacggcagctgcaaactattttccagcagttgctgaagctaatttatcacaaatcccattgattgttttaactgctgatcgtccacatgagcttcgaaatgttggagcaccacaagcgatggatcagttgcatttatatggttcacatgtcaaggattttacggatatggcacttcctgaaaacagtgaagaaatgcttcgctacgcaaaatggcatggaagtcgcgcggtggatattgcaatgaaaactccacgtggccctgtgcacctcaatttcccattacgcgaaccgcttgtgccaattctagaaccttcaccgttcacagctaccggaaaaaaacatcatcacgtacatatttattatacgcatgaagtattggacgatagctcgattcaaaaaatggtgacagaatgcactggtaaaaaaggcgtattcgtcgttggtccaatcgataagaaagaattggagcagccaatggttgatttagcgaaaaaactaggttggccgattttagctgatccgctttctggactccgttcttacggggcgctagatgaagtagtgattgaccaatatgatgcattcttaaaagaagcagagattatggataaattaacaccagaagtagttattcgttttggaagtatgccagtttctaaaccactgaaaaactggttagaacaactttcagatattcgtttttatgtggtggatccgggtgctgcttggaaagatccgattaaagcggtaacagacatgattcactgtgatgaacgatttttactagatatcatgcaacaaaatatgcctgatgatgcgaaagatgcagcgtggttaaatggatggacatcgtataataaagtggcacgagaaatcgttttggctgaaatggcgaacacaaccattttggaagaaggtaagatagttgcggaattacgccgtttgttaccggacaaagcgggactctttattggtaatagtatgccgattcgcgatgttgacacgtacttttcacaaattgataagaaaataaaaatgctagcaaatcgcggggctaatggtattgacggagttgtttcttcggcgttaggtgctagtgttgtcttccaaccaatgtttttactaattggtgatttatccttttatcatgatatgaacgggttacttatggcgaaaaaatataagatgaacctaacgattgtgattgttaataatgatggcggcgggatattctcgttcttacctcaagcaaacgagccgaagtattttgaatcattatttggtacatctactgaacttgatttccgttttgcagctgctttttatgatgcagattatcacgaggctaagtcggtagatgaactagaagaagcaatcgataaagctagctaccataaaggtttggatattattgaagtgaaaacaaatcgtcatgaaaataaagcaaatcatcaagcactttgggttaaaattgcggacgcgttaaaggcattagattaatatgctagtaaacggtcgacattatcatctgacaactgctataagtggagaaaagccagctttactgatgttacatggttttactggaacaagcgaaacatttcaagatagtatttcaggtttgaaagaacattttaatattattgcgccagatttacttgggcacggaaataccgcaagcccagaagaaatatcgccttacacaatggaaaatatttgcgaggatttagctggaattttacatcaattaaatatcagtagatgttttgtacttggctattcgatgggcgggcgggtcgcgactgcgtttgcagcaacctttccaaaaagggtgcgtggacttattttagttagtagctctcctggccttgaacaagcagatatccgagaaagccgtgttgcggctgataatcgtttggcagactggattgaagaagagggcttggtgccttttgtggactactgggaaaatttagctttgtttgcttcacaaaaagttttgtctcctgaaatgaaaagaagaattaggtcagaacggctatcgcaaaactcgcatggtttagcaatgagtctacgtgggatggggaccggaaaacaaccatcttactggaactgtttagcgaactttacttttccagtgctactcattaccggtgctttagatgagaagtttgaaaaaatcgcgcaggaaatgcatcaacttttaccaaatagtacgcatgtttcaattcaagaagcggggcatgcagtttatttagaacaaccaaacagcttttcaagtcagcttaattactggctggaagatattttgaaggaggaagaaaaatgagttttaattggcaaacagaaaaagtatatgaggaaatcaaatatgaaagttacgaaggaatcgcgaaaattacgattaatcgtccagaagtacataatgcatttacaccaaaaacagtaacagagatgattgatgcatttaacttagcgcgtgataattcgaatcttggcgtgattattttaacaggggaaggcgaaaaagctttctgttctggcggagaccaaaaagttcgcggtcatggtggatatgttggcgatgaccaaatcccacgtttgaatgttcttgatttacaacgtttaattcgtgttattccaaagccagttattgcgatggttgcgggctggtccattggtggaggtaatgttcttcaattggtatgtgacttaacaattgcagcagataatgcaaaatttggtcaaacaggaccgaatgttggtagctttgatgctggttatggttctggctatttagcacgtgttattggacataagaaagcgaaagaagtttggtttatgtgccgtcaatatacagcggatgaagcgctagaaatgggctggattaacactgttgttccagtagcagatttagaaaaagaaacagtagcttgggcaaaagaaatgctacaaaaaagtccaactgccttgcgtttcatcaaagcagctttcaatgcagatacagatggtttagcgggtattcagcaattagctggtgacgcaacacttctatattacacaaccgatgaagccaaagaaggtcgcgatgcctttaaagaaaaacgtgatccagactttgaccagggggcaaaattcccttgatttgaaggtgtaaaaatggacatgacaaactggcttcaaaaacgagtgcggctttctcctaaagagaccgcactcgtttttgaaggaaaagaagaaacatttgaagaaataagtgaagcagtaaaacaacttgcgggtaagttattcgcgttagggattagaaaagacgagatggttgctttgctagggaaaaatgatcggatgacttttttactcattcatgctctgcaacaacttggtgcggtcactttatttctgaataatcgtttgacgaaaaaagagatatcgtttcaactcgcgaacgctgaagtaaagcaagtgattgtagcggattcgttagtagataaggtagccactggaattagttatgctactttggcagaaacggattatgaagcgccagcgttgttagaaacatgggacttatctcgcgcggcttctgttatgtatacatcagggacaacagggaaaccaaaaggtgttgtgcaaacttacgaaaatcactggtggagtgctgttgcttcggtgctgaatttaggtttaaccgagaaagatagctggctctgtgctgtgccgatttttcatattagtggtttatcgattatgatgcgttcggttatttacggaattcccgtatatttggaagagcatttcgatgaagaaaaaattacgcaattgcttgaaagtggtaaaatttctacgatttcggtcgtgacttctatgctggaacgcttgttgaaaatacacagcggaagttatcatcccaatgttcgaaccgttttactgggcggcgggcctgctagtaaagctgttttggaaatttgcaaacagcgtgatattcccttagtgcagtcattcgggatgacagaaacagcttcacaaatcgttactttaccaccaaaagatgccttaaataaaattggttcttcaggtaaagcgttatttccagcagaagtgaaaattgcggatgacggagaaattttactaaaaggaccatcgattacacctggatatttacataataaaaaagcgacagaagcttcgtttgtggatggttggttcaaaactggtgatattggctatttggatgaagaaggctttttatttgtgttagagcgtcgttctgatttgattatttcgggaggagagaacatttatcctactgaaatagaacatgtcatttccgagtatgagggcgtgaaagaagtggctgttatcggtaagcctgacgataaatggggtagtgttcccgtcgcttttatcgttgcagaagaaacatttgatgaagctgaattacggcttatctgcgatacaaatttggctggttataaaatccctaaacaaataacgattgtcgaaaagctacctaaaacagcatctggaaaaattcaacgcaataaattaaaagaaaggcactctatgtaaacagagcgcctttctttttaataattaagaccttcttttaatgcttttaaattatcgttcataatggaaagataatcacgtttttgatctaagtctttttgcgtaagtgtttctaaattgtggagtgtcagtgtttttgtatttgtttcttgttgaataacatctgctatttttgagttagtgttttgttctaacataatatatgggattttctctgcttcgattttttcaacgatagattttaatttcttttgagaaggttcatcacttgttgatacaccggcaataggaatttggtgcagaccatattctgtttcccagtagctataggctgcatgtgctgtcacgaagtctttttgaaagcttcctttgtaactgtgcggaaatcttgatctagctttttcaattttttttcgacagcctggtaatttttttcgaaagtttctttttgatcgggcatttctttgattaatttatcttttacaactgttgccatttgttccatgtatacaggatttaaccatacgtgcgggttaactttccagcacactggttcccctcg

SEQ ID NO: 3814 - DNA, 5563 bp, Listeria monocytogenes 4b
  misc_feature (1)..(end): n can be any nucleotide: a,g,c or t/u
gaaacattccacttaggcactgaaaacattgtctttggaaacatccgtgatgctattaaatcagatgctacttctttactgttttttggaaaaattgaccaacttgatttaattagcaaacacttggatgaatctctttccggcgttatttctcaccatacatggggagcatctgcttggccagccgttgaaattattaaattcggtattcataaagctattggcgtgcaagcagcggctaaaacactcggctttgatcgtaaagatatcattgcatttggcgatgaaacgaatgatttacaaatgcttgattacgctggtgttggggttgctatgggaaatgctgccgagtctgttaaaaatgtggcaaacgtggtaactgcttctaatcaagatgatggtatagcactctatttagaagaaaacttaaacctataataaaaagctgcaagtaaggtcttacaaaagttaggaatgctaatttttgattcaagagccattactttgcagcttttttacatcattttatttttatacatcgccattgctaatttttgatctgcttctgaacgaaaatcaccgaatacgcttgaggtctccataacattaataaatgctttagagtcaaactcgccaacaatgtgcgtaatatcatatagttcataacgcgtaatcaccataatcagcattgctacgtcttcttttgaataaccacccatcgcatccacaactgtaattcctcgtaccatgttctcatggattgctttgattactgtttcagagtgttgcgtcattatcatgacagtcagcttctgatgtcttgtatgaataatgtcaataactctactctgaacatataaagaaatgagcgtgtacagcgcaaatgtccaatcatatgcaaaacctgcaacaataataataactccatttaaaagcaagaaatatttcccaaaagaacgccctgttttaatagtgatatacattgctactatatctaatccgccagtagaaataccgaatttcaaagccagaccaatacctacagatgcaattaaagccccaaaaatcgcattaagcaaaatatcactagatacttgcacctctgggataacaatcaagaaaaaggacataaaagcaactgttaaaaaactaaaaacagtaaatgattttcctacttttaaccaccctaaaatcgccactggaatatttaataacagaacaagtagtcctgttgaaatagaaatattcattgaatctcgtaacatgtctgaacctagttgtgcaaccccatttaatccagctgcataaacttgtgctggtattaaaaagaagttcatgcctattgcgtttaaaagtgctgctattattgcaatggcggtttttttagcatactctttatatactatttttgaactcattttcttctctccttttttggccctaacataacataccaactttctagagaaaagagaagtcttttttattatttttttgatttttaattaaataatggatatccgcctgataaatagaagcctaatgagatggtaatcactacgacaataacaaaaatcatcaaaaacattcctgttggtttttgttgtttcctgtaactaagtagcatctccactacaccaattacaatgattcccatcagaattttaaatattgccagaatccaactttgctctatgctgtatttgaccatcataattccactcaaaataaccagaatataaaaaactcgattgatcatttgcaacattgtaaaactttttgtcgatttcgaataaatgagtaaagctgtaaccgttagtacaacaatagccacccatgaaatcaaatgaatataaccccacataatacatccctctttcttattaagattttcttactttgttagtcagtgtcccaattttatcaatagtaatttcgacaacatctccagcttgcagaaaagttggaggtgtcatgcctttccccacaccacttggagttcctgtagctatcacatccccaggcaacaatgtatgcccttttgataaatcagaaataatcctagctaaattaaatatacatttatctgtagagtcagactgtcttatttcaccgttaaccttagtttcaatatgaaaaacaacttctttacttccattgttttccagcacatatggtcccattggacaactggcatcaagacttttcccaaggtaaaattgtttatgttttttctgaagatcccgagctgttacatcatttaaaatagtaaatccaaatatggcggataatgcatcttgctcggataaatctcttaccttttctcctataattattgcgagttcgccttcataatctaattgactagttaggttttgatgtagctcaattttgccattatgcggcaataaactattagcactttttgtaaatacaaggatatgttctggaacgtcttctttgctccccatctctagcacatgattataataatttttcccaattgcaataatattatttggtggggtgataggaacttggatttctacttcagctaaatcaatatcccctttgattccttttagttcagggacaagcggcttttctttgataaagtctaaaagagtagcaggtggattcgaaaaaattgtttgtgcagggataattttattttcaggtgttaaaatgccataattaaaatcgccctcatgctgataactcaaccatttcatttaaaaaccttcctttgtgtttatttgacatatatgttgtccatcgaagaaatataaataagctgcatcaacttttttaccacttatcgcttgaatcgcttttgcataaagtttgatttgaatatgatatcgttctttcattattttttcagcagcttcccaattagaatacctaccctctattttatctgttttatagtcaatcaaagtaattgtttcttcttcttcaatcatgctatctacaacaccttggataagtacacgttcgtctatatcaactttttcgtataactcagatacaggaagtaaataactaaatggcacttcacgttttactaaatcttttttctgcaacatagtttttcctaattgcgattcaaaaaagcctagcacttgtttaatattgattgctttaagttgtgcttctgttagtatatccttttcacgcattgtttgtaaaagctgttccaaatcttcctttgtcggttgatgttctaaagaaactgcttgcattagcgtatgcattgccgtgccaatttctgttgcagataatttattttgctgtaaaaatttgggtctgtctaatgaaactttttgaaattcttttaaaagtgtagtatcactccaactatcttgcaaagaaaattgccgcttgagctctgttaccgactgtttagcacgaatctttgtcgcctcttcattttggtactcatagttcatatatcgctgaatttcatccttataagggcttttgacaggtattggttgatgttcttttatattgtccaaccaattaaccgtttctgtcttttccaattcattagttagaaacatttccttggtttttatttcaatctgtagtttcatatctgtcggaagcgtttggatcatttcctcacacaataattctttaaaattagaatgtctaattgtggcgtttcctatccaatccaaataacatttcgctttagctcttgtggatgcaggtaaaatagtctctttttcttttgcaacttgtaaccaattcttacttgttttttcaaaatcaggcaccgttgctgtcaaaattaacttctcttctgcacgagtaagagcaacgtaaagaactcgcatctcttccgcgatcatttctcgagattttttttgtttcattgcttgctgcataattgttggataaacaatcattttctctatatctcgataattagatgcaaaaccgtaatccttatctaaaagtgttttgctataaatatcacgcatattaaatttcctgcttaacccagagacaatgaccactggaaattctaatcctttacttgcatggattgtcatcatacgaacgacatcttctttttcaccaagtgtttttgcggttcctaaatcatcgcctcgaacttctaagcgttcgacaaaacggacaaagcgaaacaacccacgaaaagatgttttttcgtattgattagctcggtcatataacgcacgtaaattagcctggcgttgtttgccacccggtaatccaccaacaaattcataaaaattagtttcttgatagatttgccaaattaatgatgttaagttttcccggatagataactcacgccaattatttaactgttgaataaaatcactcattttatctgcagtttccgaaacggttgtatctttgtatgttaacaatgcatcatagaaataaccattctttttcgccatacgaacttgtcctagctcttcttcgtttaaaccgattatgggtgaccgtaaaacagcagcgagcggaatatcttggtaagggttgtcaatcactttcatcagtgcaatcatcgtagctacttctgttgtttcaaaataaccagaattgttattcgcgtaaaaagggatatcctgaactttcattgcttcttccatatctggagcgcttgtcatcgccctagctaaaataactatatctcgatattgaatcggtctgttttgtttcatttttttatcaaatataggaaacttattgtctatcatttctttaattttcattgcaattgcacgtgattccacttgatttttttgtaattcttgaggtgacaattcatcttcagtttcactctccacagacttcatatcaattagcagtagttccgtcgccatatcagtcgtttcaggaaaacttgcgcctaaagttaattccgccgctgcatcataatcaatttcagcaatgtgcttatccatcaattgatgaaatataaaattagtcgcatctaaaacttcttttctacttctaaagttttgcgacaaatcaatacgtattccgcttccatttccatcttgttggtaagtttgatatttcgtcataaatagcgttggttctgctaaacggaaccgataaatagactgctttacatccccaaccatgaataaattcccttgttcctcacctgaattagttactagtcgtaggatagtttcttgcaccatattagtatcttgatattcatcaattaatacttctttaaattgtttttgatagtttttagcaacttctgatgcttcattgtcttttaataaaatctttaatgctaagtgttctaaatcattaaaatccaatactcctctttgctgtttttcttcaaagaaattttcagcaaattttttcactaatctactcaaggttttgatgtctggtttcattttttctaagtcagataaataatttatttcttctcgtgaaaaccaatcagttgcgatatttttaatttctttttttgctgcatctcgaaatttctttgcttcctctacatattcttcatcgtaatcacttttattttttagtgttggaatac

SEQ ID NO: 3815 - DNA, 3617 bp, Listeria monocytogenes 4b
  misc_feature (1)..(end): n can be any nucleotide: a,g,c or t/u
tggattatcgcgtaagcttgagaagcgaccgatttaacaacgagcctcaggaattccttttcgattaaggtaaacaaagtgaccgtggagttccaacccagaccgtacctgtaccaatatgatggccaatgccaattagtggtccatagttacagatgatgagaaaagaccgccaacaaaaatctcttgaataataattatacccgcgccaatgaagcgcaatcctactaacctagttgagatttctacacgacattgggtcatacacatacattcatgcatgggggcatatttcggaaaaccatattgagaaacaatcataattaatgcgctaccgagcgaaacaagaaaatgtgtccggaatccagcttctttacctctgatatctcggtcaagtccaataattgctccaaggagacccgcaacatctagccgtaaaataaaatctactaacatagttatcacatccttaacgttaatatattccctttggcattaaaccaaaacaatcaaaaaggaaattttgcgccggatggatgtttatactataataaacaatgaatggtcaaaaagtgaggtgttaagcgtggcagaaagttttgtgagattagagcacgttttttataaatatgaggatacggaaaaatatgcagtgaaagatgtatctatttctgctcaaaaaggggaatgggttgcacttgttggtcataatggttcaggtaaatctaccattgcgaaattactcaacggattgctttttccagaagatggtttaatcaaaatcggacactttgttttgtctgaaaaaaatatatgggacattagacgacaagtaggaatggtttttcaaaatccagataaccaatttgttggagctacagtgcaagacgatgtcgcgtttggacttgagaatcacggggttccgcacgatacaatggtggaacgcgtcgagtcagctttgaatgaggttggtatgcaaagttatgcgttacatgaaccagctagactttctggtgggcaaaaacaacgggtagcgattgctggcgttttggcgctgcaaccagatgtcattattttggacgaagcgacttctatgcttgatccaagagggcgcgccgaagtaatggaaactattcggattatgcgtgaacaagaagacattaccgttatttcgattacacatgatttggatgaagttctttttgcggatcgagtaattgttatgaataacggagaagtccacagtgaaggcacaccgcaagaaattttcgagcaagcagatgcaatgcgcgaaattggcttaggtgttccatttattattgaattacaagaaaaattagttgcaggtggctttgaaactggaagcaccgtgctatcggaaggagcattactagatcaattatggaaattaaactcgaacaactaggttattgttatcaaaaaaatagcccttttgaaaagcgagcattacttgatgtgaatgtttcttttgattctggtagctattctgcaattattggtcatactggctcagggaaatcaactttgctgcaacacttaaacgctcttttaatgccaacagaaggtaaaatcacagttggtgatcgagaaatcgttgctggcgtaaagcaaaagaaactacgtgatttacgtaagaaagtcgggattgtgttccaatttccagaagcacaactttttgaagaaacggtcgaaaaggatatttgttttggaccgatgaactttggagtttccgaggaagatgcaaaactacgcgctaaaaaagtgatttatgaagtgggactgaccgaggaaattttgtcacgttcgccgtttgaactttctggtgggcaaatgcgccgggttgcgattgcaggtgttttggcgatggacccagaagtacttgtgctagatgagccaacagcgggactagatcctcatggccgcgaggaaatcatggaaatgttctacaatcttcataaagaaaaagggcttacgacagtacttgtaacacacagtatggaagatgctgctcgttatgcggaaaagattgtcttgatgaaagctgggactgttcttcaaatcggtacgccacgtgaaattttcgcgaagccagacgaactggttgatcttgggttatctgtaccggatgtggtgagattccaagggctttttgagcgcaaatttgatgtgaaattaacaaaaacttgtttaaccattgatgaattaacaaccgaaatggcgccttatttagcgaagggcggggcataattatgatggataaaatgattctcggacgttatattccgggaaactcttggttgcatcgaattgacccacgtgcgaaaatcactgctgttatggcgtttatcgcgattgtctttttagcgaacaattggctgacctatgcgcttatgtttgcgtatgttttgtatttagtcctaacttcgaaagtgccatttttattttttattaaagggttacaaccgattttctggcttattttaattacgctattacttcaagtcttttttacaaaaggcgggacagttttagtcgatctaggacttttacaaataacgacactcggactgacaaatggagcgatgatgttttgtcgctttgttctcattatttttatgacaacacttttaacattaacgacaagcccgattgaactaacagacggactggagaaaattttagcgccgtttcgtttagtgcatttaccagtacatgaacttgctttgatgctgagtatttctttgcgctttattccaacattgatggatgaaacggagaaaattttaaaagcgcaaaaagctcgtggcgttgaatttacgagtgggaaatggagtgatcggattaaagcgattattccgttgcttgtgccactttttattagtgcgtttaaacgtgcggaagatttagcgattgcaatggaagcacgcggttatcgtggtggtaaagggagaacgagattccgtttactacgctggcgatttgcagatacgttgctactgatttcgttagtagtgttaagtggattattattttggttgcggagttgaaataaatgacgagatataaagcgataatttcttatgatggtagcgggttttatggctatcaggtgcagccgaatacacggacggtccaagcggaaattgaaaaagcactgacaaaaatgcataaaggcaagactgtgcggattacagcatcaggaagaacagatactggtgttcatgcgaaaggtcaggttattcatttcgattcggaacttgatatcactgccgaaaaatttcaaaaagctttgcaagtcatgactccgttcgatattagctttttaacagtggaagaagtaccagacgatttccacgctagatttggcacagttggaaaagaatatcgttatgtggtaaagcggacgaaaatttttgatccttttagtcggaattttgcgctacattatccatatgaactggacatttcaaaaatgaaattggcaagtaaacgcctgattggcgagcatgattttacaagtttctgttcggcgagaacggagcgcgatctttccagcacactgtcggcccctcgagcagcntncanagtncccaaag

SEQ ID NO: 3816 - DNA, 4160 bp, Listeria monocytogenes 4b
  misc_feature (1)..(end): n can be any nucleotide: a,g,c or t/u
tattacatgtttatttatcactagcacggtggaagaatggatcttatcagtacctctaaatatttaatttctgtcataattatcagtcctttgctaaatggttggaaccaatatatcacttcatttataaaaatacaagccagatttattccctgctatttttggatttcatcaaaaaaagacgaactaaaaagttcgtcttttgctttatttaaccaatcgagccttccatttcaaacttaatcaaacggttcatctcaacggcatattccattggcaattctttcgtaaatggttcaatgaagcccataacgatcatttctgtcgcttcttcttcgcttaaaccacggctcattagatagaaaagttgttcctcggatactttggaaactttggcttcgtgttctaatgagatgttgctgtttaggatttcgttgtacgggattgtgtccgatgtggacaggttatccataatcagcgtatcacattcgatattcgaacgtgcaccgtctgcattacgaccaaaatgaacaattccgcgatacgttacgtttccgccttgtttcgagatcgacttcgacacaatcgtagaggacgtattcggcgcatagtgcatcatttttgctccagcgtcttgacgttggcctttaccagcaatcgcgatagaaagggtcgttccacgtgctccttcgcctcgtaaatgtacagctgggtatttcattgttaatttcgaaccaatgttgccatcaatccattccattgtcgcattttcttcacagaaagtacgtttcgttactaggttgtaaacgttatttgcccagttttggatggttgtgtaacgacagtaagcgcctggttttacaatgatttccacgacagcagagtgaagggaattcgtagtataaacgggagcagtacagccttccacgtagtttacgctggcattttcgtccacaataattagtgtccgctcaaattgacccatgttttccgagttaatgcggaaataggcttgaagtggcgtatctactttgatacctggtggtacgtagatgaatgagccacctgaccaaacagccgagtttagcgcagcgaatttgttgtcgcttggtggaattacttttgcgaaatattctttgaaaatatcttcgttttcttttaacgcggaatctgtatctttgaagacaatccctaaatcttctaggtcttgcttcatattgtgataaactacttcggattcatactgtgcagatgccccagccaaatatttttgttcggcttcaggaatacctaatttatcaaaagtacgtttaatttcttcaggaacttcatcccaagagcgcactgtttgttcagacggtttcacgtagtaagtgatgtcttcaaacttaagttctgacaggtcgccaccccaagtcggcattggcattttataaaattgctccaaagacttcaaacggaattcaagcatccattctggttcttctttaatattcgaaatttctcttactactttttctgttaatccgcgttctgtacggaacacagaggtatctttgtcatggaatccatattggtattcgccaatttctggaatttcagtcatgtcgtatcctccttttcgctacttattttgttccttctttttcaaaaatcgctctctccattgctttccaagaaagggttgcacatttgattcttgctgggaatttcgcaactccggcaagtgcctcaacgtcgccgtattcatcaatcgtttcatggtcatgaccttgcaccatttctgaaaattcacgtgacatttttagtgcctctttctcggttttcccaataatgctttgcgtcatcatcgaagcagaggccatcgaaatcgaacagccgctaccagtgaattttgccgcaacgattttatcaccatccatttttaaatgaagatgaatttgatcaccgcatgttgggttgttgaggtcgattgttacatcgctatctgggagctctccattattgcgcggatttttatagtgatccataatgacttgtctataaagctgatctaatttccggcttgtcataatccaaaatactcctttgttaacttgaggccatctataagcgcatcaatttcttcttttgtattataaatataaaagcttgcgcgagctgtggaagaaacgtcaagccacttcatcaacggttgcgcacagtggtgaccagctcgaatcgcaattccgtcttcgtccaaaatagtcgcaatatcgtgtgggtgtgcgccttctaaattgaaagtcactaagccacatcgtttactcgcgtcttttggtccataaatggtaatgccttcgattttgctcatttcttctatcgcgtagctggctaatgcttgttcatgtgcgtgaatatttgcgagtccgacttctgccaagtaatcaatcgccgcacctagcgcaatcgctccgccaataatcggtgttccggcttcaaatttccacggcagttctttccaagtcgaatcgtataattcaacaaaatcaatcatttctccgccaaattcggtaggttccatcgcatcaagcaattcacgtttgccatacaaggcgccaatgccagtaggagccatcattttgtgccctgaaaaagcataaaagtcagcatctaaatcaactacatcaacttccatgtgaggcaccgcttgcgcaccgtcaacgagaatgactgctccaaattgatgagcaattgctgcgatttctttcattggcgtgatagtcccgagtacattagaaacatgagctaatgcaacgattttcgttttttcaccaatcgtttttttcgcttgttccacagaaatcgtgccatcttcttctagttcgatatatttcaaaaccgcgcccttgcgtttagctagttgttgccacggaatcaaattggaatgatgctctagataagaaataacaatctcatcgccagcttcaatatttgcttccgcgtaactatctacaactaaattaatcgctgaagtagtacctcttgtgaaaataatttctgctacttcacgcgcatgaataaacttggctactttacctcgagctgattcataagcatccgtcgctcttgctgcaagtgtatgcacaccgcggtgaacgttcgcattatcaaactcatagtaatgtgttaaagcttcaataacttgtttcggcttttgtgaagtggcagcattatctaaataagctagcggtttttcatttatttcttgagctaaaattggaaaatccgcccgaattttttggatatcaatcatttagcgcactttcccttcgattacttcacgaagcatcgttttcacactttcgattggtaactgacgaacaacaggatctaagaagccatgaataactaatctttctgcttctttttgagaaatcccgcgactcatcaaatagaataattgtagtggatcaacgcgtccaacagaagccgcatgccctgctactacgtcattttcatcaattaataaaattgggttcgcatcaccgcgtgcttcaggactaagcatcagtacacgtgattcttgttgtgcatctgacttagaagcgccatgtttaatgtggccaattccgttaaaaatagttgtcgctctttctttcataacaccatgggataaaatcgtaccattagaagctttaccgtaatgcgtcacgcgcgttgtcacgttttgcgtttgcttcccgcgtccaacagtcaccgttttcacatcagcagaagagccgtctcccattaggtttgttacgttctcgttgatagtatcgccatcattcatcaggccaagcgcccattcaatttggctatctgttccaatgtgtccacgacggttcacatatgtcgtaacatcacttgcaagattgtctacaccgccaaaagtaatgcgcgcatttttctcagcgattacttcttccacaatgctaacaatccctttaggtgcgttatctaccgttacgtagttttccacataagtgactgagctattatcatccgccacaagcaacacatggttaacaagtggagattccgctttatcttgtacgaaaacagcttgaattggtgctttcacttcgacatttttaggaacataaaggaaaatcccaccgttcacaagcgccgcatga

SEQ ID NO: 3817 - DNA, 3880 bp, Listeria monocytogenes 4b
  misc_feature (1)..(end): n can be any nucleotide: a,g,c or t/u
gatcattcgtatttattttacctttttcttctaattgtaaaagtgccgttgctatgattgctttttgagaagagccaatataaaacaaagtatcntggtgtattcaatactttttcatcacgatttgcatacatataccctttttgtatgatagtttttccatcgcgaacaaccagtgccgaaccactaaaaccaattttttgtaaatagttatcaatttcttgattttttacaattgtttcctttggcttttcttctactggttcaggctctttcgtttcttcaggctcattagttgctgcattttccggtgggtttgttgcggttgctgctttcttcttagtaggtgcggatactgtttgctcttgtttacttttgaattcgtatatcatccaacttgtggcaataaacagtagaaatacagtactcaacacgataatcatgttcttgcgtcttttgtgtttacgtctttcgcgtcgattcatttcatcactcctggtctagtctaatcgttaaatgactttcccaaaagagaatgtattaatagaaaatatcccaaatttctatcaatacctaacactccacatatatcgtaatttattacttcagataaatcaatacggaaatatacctatgttttaaaaaaacttttcagtggtataataaggaaggataaattgattaagcaacgacaaattgctataaaggagactagataaaaatggtacaaataacaaaaggtaaatttgatggtttacaaagactctccaacgaaaaaggtgtcattgcagcgcttgccattgaccaacgtggctcactcaaaaaaatgatccaacaagcaaaaggaacagaaaacaaaaaagatgtggaagacttcaaacaacttgtttctgaagaacttacaccttatgcttctgcgattttgcttgatttagaatatggtactccagcaatcaaagctcgccacgaaggtagcggacttttaacttcttatgaaaaaacaggatatgacgcaacaactcccggtaaacttcctgatttaattgaagatttatcggcacttcgtattaaagaaaatggcggagatgctgttaaaattctcgtttattatgatccagatgagccagctgaaattaatgaaatcaaatatgcctttttagaaagaatcggtgctgaatgtcgcgcagttgatattccatttttcttagagccaattacttatgatgcaacagttactgattctggttctttagaatatgctaaattgaaaccagcaaaagtaaaagcttcaattaaagaattctctaaacctcgttacggtgtagatgtacttaaacttgaagttccagttaactttaaatatgtggaaggttttgcggaaggtgaagtcgcttatacgcaagacgaagcagctcgtcattttgaagaatgctctgacttaagcccacttccatttatttatcttagtgctggtgtaacttctgaaatgttccacaaaacaatccaatttgcgaaccaacataacgtgcagtatagcggcgttctttgtggtcgtgcaacttgggctgatggtattgaagtgtatggcaaacaaggcgatgacgctttacgcgaatggcttcgtacgcaagggaaagaaaacattacttctcttgataaattgcttgatgaaggtgccgttccttggtggacaaaatacggttcttttgaagacgtacatgtagtagaaaaacaatagcatgcgaaaagcctccagttaattgaatttagctggaggctttttttattaattttgatttaaataattatacgcaaactgggcatatagctcggcgccatttttcatgacactttcgtcaatattaaatcggccatggtgatgcgcccattcggtgtctttttctggattgccgcagccaacgagtgcgaaacttccgggagcttcatcttgaaaatagctgaagtcttcgccgcccgtggttggacgttcaaagtaaagcatctcttcgccgaatgattctgtgattgtttcttggacgagtagtgcgcttttttcgtcgttgattactggttgtgtgccttgtttgtatatcatttctgccttgccaccgtagatagcggcggtttgtttggcgtagtgttcaattgattttgcgactttggcgcgtgttatgttgttgaagcaacgaagcgttccttccaaacgggcattctctgcgataacattgtagcgagtgccgacatccattttgccgatagttactacgactggatcaagtggatctgtttcgcgtgatacgatggattggaggttcataacgaatgaggaagcaattacagcagcgtcgattgtgtcatgcggcattgctccgtgaccaccttgtcctttgaagtcgatttggataatatctgcggaggcgaatgtggagccgactacgcacgatatctttccacttggagtttgggaccagatatgaatcccaaacacgtggtccacgccttccatcgctccttgggctatcatagctttcgcaccctctgcgatttcttctgaaggttgaaaaatgaggcgcactgttccgggtagttcgtcttttatttctacgagtgcttttgccgcggttattagcatcgctgtatgagcatcatgaccacaggcatgcattttgccgtcttctgtggatttatatgggaggtcttggtttagttcttggactgggagtgcgtccatatcggcacgcaaggcaactgttttccctgatttcccgcctttgagttccgcgattaatccggttggttccgtgcggcggtaaggaatgcccagtttgtccaattctttggcaactttgtcggtagttctaaattcctgccattggagttcgggatgcatgtgcaaatcacggcggaaggcaatcattgcttcttcattatttaaaactgcttgttttattttctgattcattcgcgctttcctccgtccatttttttactgtttccagtacgacttcgattcctttttggagtttgtcgtaatccgtccattcttcgggcgcatggcttataccattgtggctagggacaaaaatcaagcctacttcggttaaacctgcaaaaatcattgcatcgtgtcccgccccgctaaccattgttcggtattttaagccgagttggtcggcactttcagtcaatgcttgatgaatctcttttgataaatgggtcggcggttcgtatagcatatcttctatttcgcaagtgatgccgtttttctctgcggattggataatttcttttgtttttgctaatgtattttggacgtgaatttcgtcttttgctcggatatctacggtaaaaacgactttatctggaataacgtttgcgccatttggatagacgttgagtttgcccactgttaatacagttccgccgccttcttggatagctagttctggtagttgacctaaaatttcgacagctgtgatcagcgcatcttttcggtcaagcattggggttgtgcctgcatggccggcttgtccttttactgttacttttatttctgttaaaccgactactgtatctactagcgccacatcttcattggcattttctaggactggtccttgctcaatgtgtagttcgataaatgctttaacggattctttcgtgcggatagctgtaactacttgatttgcatcaaatcctacttttgccatggcttctgcggctgtaattccatctatatctttcatttcatggagcatttctttggtaactttgccagtaattgtacgtgaagcaaggaggccagcgccaaaacgagcgccttcttcttccaccatcgcaataatttcaagcggaaaatgtggtttaatttgttgttcat

SEQ ID NO: 3818 - DNA, 4985 bp, Listeria monocytogenes 4b
  misc_feature (1)..(end): n can be any nucleotide: a,g,c or t/u
attgctccggtccatacaaatgctaaactctgccaggattgcgtttgctccactgatttcttctctgtcattatgttccgcccctttttcttgaatttgttatattaatgactaattatataagaactagctatcatttgtatttatcagaattgaaaaaaaatagcgcaatctttgtcgttttggacaaaaaatgcactatttttatttattattgttatttccaccaagaatccgtcgaatcgccactgctaaataaaggttgtaggattctgggatttttgtcgccggatattgcaataactcatttatccgttgtattcgatatttaatcgtatttttatgcaggaatagtagttcagctgcttgattataattggattcaccttccagtaaaaacacagacagcgtttcaattagttcatcattatcctctaaaggctttagtggcctcatttgttctgcaattgctagttctcctcgatctactatttccacacattttgctgcgaaatcaatttcttgaagagaataaatggacttgttcgcataaatcgcatttgccgcatttttatattcattaacgagcgaataagcgctttgcacatctgacgtttgctccattccttggcaaacggtaattttcaagtctatcccatgttctttcatcatcatcgcaaactcattggctgtatgcgtccggtcccgctgcgccactgaattatcaagtaaaacaacgatattgtcttcaaataaatcaattaatgaaacttggaagtgactagctacaaaacttttcagttcagctaaaacttgctcattgtcgcgaatttcttcggtttttacaagccacatccatttaatagaagaaacatccacatttaaaatcttaccaagtcgccgcattttgacactttcatcatttaaaatggctttcatcagttcagctgtactgatttcgacatagtttctgccccataaattcataaatacttggactacttcggtaatttgcatgactacatcggctgttaatacgcctttttctttcatcataaataagtgcatcgcttgcataccgtcttgaaaaatcggttttctggccgtataaaaatcgcgttcatccaaggtaagctgtacaagctcatgttcaccgatttgtttagatgcctcaattatccgttcaaaatcccagtggcgcgttcgtggccaagtgatagaattaattacttggaaagaattatccgttaagacgagcgaagtatgcgttctatcagacaaaattttcagtgtggtatctatatttcgttgtggcggtcgcacactcgaaatctgttctaatgactcggttacaaagttggtatctgtcatttcttgcttcacaatcgcttcgactacttcataaatcacttcgctatatctaagtgacatctcgttttccggcatcacgataatggtaaaatcaagttcatttgcaaaatcaatcagtttttgatccattttcggcacaaaaattcccacgtagtaaagaattaaagcaacttcgccaaccttatgtaatcgctcaattgtccgacactgtgcctcaacatcgtcacgaatattcacaaaagccgatacaactatttcactgccataaaattcatcattatcaaataaatcatcttctaaaagagctacctctgtatattctaaaacagaaatagacgaaacaagcttagataatccagattttccagagactactttcgcttcttttaaagatggtaatttcattaaatctgccaattttacgctcaaagttcgccacctccagttattctaagtgtaaacaatctcctagaaaaagtccatgccacgttaaatcttttacattcaaggcctattatagtagcattgaaccatgaataaacatattctgattaaaaacataagaaaagaaacggaggcaaattatgtctatagagccatccattaaaatagaagaaattattaatgaagttgaaaaagtaatcgtcggtaaacgacatgttgttaaattaagcttaactgccctacttgcgggtggtcacgtattattagaagatgttcccggtgttggtaaaacgatgatggtccgcaccctttctaaaacaattggtgtttcctttaaacgaattcaatttacaccagatttacttcccgcagatgtgacgggggtttcgattttcaatcctgaaacacgtgattttgaattccgtccaggtcctgtcatgggaaatattgttcttgcggatgaaattaatcgtactgcgcctcgaactcaagccgctttacttgaaggtatggctgagaatagtgtgacagtggatggtattacgcgcaaacttgccaacccatttttcgttatggcgacgcaaaatccgattgaatacgaaggaacgtatgcccttccagaagcacaattagaccgatttttactcaaaattaatattggttacccgacagtcgaagaagaaatgcagctacttacattaaaacaataccaagatccacttgatcaaacgcagcaagtggtgacactcagcgaattactggacctaaaaaacaaagcaaagcaagtctttattgatgatgttttaaaaaattatattattcgcctagttgatgcgactcgaaaacacccttccgttgcgctcggaattagtccgcgtggctcgctcgctttcatgcaagccgctcaagcttttgcgcttattgaaggtcgagattatgtgattcctgatgatattcagtatttagcaccgtatattttcactcatcgtctcattttgaagtctgaagcttattataatgaggaaacagccgaatccattattgcttccattttgaaaaacacgtcagttccggtagaaaagaggtagctaaatgttgaaaaaacgcctcctattagcatttcggtggattattatgctaattatttacgctgggctttggacttatacgttatttcaaggtgatactgctagctggtttttaacctatttctttagttttatcctgttacttttatttttgtcctcgatttatccactaaaagcgtggaaagtgaatcggcgttttgttaaaaatacctatcatgatggcgatttagttgatatgcaagtatcattcactcgaaaatcgcgttatccggtgggttatttgctattccaacaaaaaatacccgctagttttggcaatgtgagcgcccgccaacaagtggtttatccgctttttaaaaagcatttcacggtcacactagctggatttgtaggcgttcgtgggattcattcatttccgccagtggatgtagaaactagtgatgctttcggcttgttagaacgttcgcgccaactatcttccgaaaaatcgctcactatttatccaacctattttccggatgtattagaaaaaatcagtgaagcttctccagaaaacgaacgcaatgccgcttattggacgcttaagaaaaacagcaatttgcacagtttgcgcgaattttcttctggtgaccggatttctcttattgactggaaatcttctgctaaaagcgaccaactgatgactagagaatttgaaaatagtgcaacatcacggttatccgtcattttttacggagcgagccatcccaattttgaattatcacttcgggcggcttactcgtttattcgcaaaatctccgaagataatggagaaattcgtgttactcttttaggcgatcaaacaagtaaatttgctccggcgaaaggtacgagtagacttcaagatatatcgactgcttttgcagaaatcgccccggtagatagtttaacgctgcaagaatcgcttgatagtaatttacattctggagagaaaatccttctattcacgccatgtattgatacgatgttaatgcaaaaagtgactcgtttaacggataataaacagctccaaatcattacttttcaatcagagcattctaaagcgatggatgctccagcgattttccttgagccagcaagtcttctaagcagatgggagcgtgaagctaaatgaaaagatatttaacgctcgtcatgctatttattctatctgttttgcttatctctgagtggatttatccattcgcagagctgaccgaactctctacagcaaactggattattttgtttataaccctttcactcggtagttttttcctccgtttgaaatattattggacaatcccgcttcatatcgtgatgattatcttcgtttcaggaatttactacgctaaaggtgggattttggcagggaattggtttgtttcttttttccaaatcacctttaatgggtttagagatatggtacagtttcgctcgtccgatatttctatggactttattttaatcgtttttttaattgctttatggcttttgagttatattactacttatagtattctgcgcaaacagcgggttatgagtgttttagttttaactgttgcttatttagcggttattaatacttttacagattataacagtaattgggccatcgtccgaactgtattagaaggatttttattacttcatcttgcactggcaagtcggattgcagcaccaaatagaattagcgcggactccttaaaacgtaatggtttgttttatcatatttttgtgattttgttactggccgtatttgtttttagttcgttaatgcttccgaaaaaagcaccgattttccctgatccggtaccgacgataaaaaatgcgcttggaattaatacaacgcgcacggtgggttatagtgaagatgatacgacacttggtggtgctctcaaaaaggataatgctactgtattcacggcccgggcggaaaaagggcattactggcgtgtagaatcgaaaacggtctatactggcactggctgggcaaatgcaaattccgcggatgtcatatctttttcttccggtgataatttccctattcaacttacagaacaa

SEQ ID NO: 3819 - DNA, 7274 bp, Listeria monocytogenes 4b
  misc_feature (1)..(end): n can be any nucleotide: a,g,c or t/u
actttactcgtgtcgtcaaaagggacttaggtttagatttagcgctttataaagaaacgcaaatgaaacgtcgaattttatcttttatcgtgaagaagcaatatattacatttggagaatttttcaaacatctcaaaaaagatgccgttcttttagatgagttcattagtttgattacgattaatgtttcgtcgtttttccgtaatcgcaatcgctgggatgcgctggaaaaacaagtacttccaaggttgcttgaagatagtcgcgggaagcttcgggtttggagtgcggcttgttcatcaggggaggaaccgtactcgctagcgatgatgatggaacgttcagttggcacaaggcattatgatattttagccacagacctcgaaccagctattttaaaacgcgcggtcattggagaatatcaaagccgtcaaatggaagaactaaccgaacaagaacggcatacggcatttgttgaaaaaggggatacatatcagattttgcctaaatatcgaaagtcgattcgttttagacggcacgatttgctgaccgattattacgaaaaaggttttgatttaattgtttgccgtaatgtgttgatttatttcacagcagaaggaaaacaccaagcatatcagaagtttgcagagtcactaagacgtggcggcgttcttttcatcggcgggtcagaacagattttgaacccagctgattacgggcttgccacattaaataattttttctacataaaaacctagcaaaaaagaaatggagttggttagatgggacgaatagaaaacattaaaaatttagcgttttttgaggacaaacctggactcgcagaacaaattctcatgcttgaaaagaaaacacaacttttcttaccaaatgaatttgaaattagacaaacagttggctatgaaatcggggataaagaagttattctaggccgactcgagtcattttattttctcgctttaaaaggtgtgggagaagataactaccgctcgcaagcatttgccagtgaagcggatgctaaagcgtttttcgttcatttaccagaaatggaaaacgagttagttgccttttggttaaatgaagtggaattagttcgctgaaataagtaggtgggagatgaagtaacgtggaaataacaacgattataggacttgtgttggcagtgatagtcattgcaggttcgttcatgattcaaaatatatcactggcgatgttatttagcgctgaagctttaattgtcatcattcttgggacaattacggctgttatgatggcgcacccatggagtgatgtaaaagtagtaccgaaactttttaaaattcttttcacaaaagagaagatgccggacaaagtggacgtacttgtgcaatacaaagaatacgcagacgaaattaggcgtagcggggtacttgcgctggaagattctgtcgatgaaattgaagatccatttatgaaacgaggcatgcgcttagttgtagatgggcagtcttccccagaatttttacgggacgttttggaagaagaagtagcgagtatggaagaacgccatgctgcttatgcgaagatttttgcatcagctggagcatatgcgccgacgcttggtgtactcggagcagcgatgggactcattcatgcgatgggggaaatgtcgaacccggacaaacttagcgaagcaatagccgcggcgtttgtttgtacgattttcggtatttttaccggttacgtactttggacgccatttgccaataaattaaaagtgaaatcacaaaaagaagtgcatttgagatatatgatgattgagggagtcgtcgcgcttcaagagcgaaatgcaccacgggttgtggaagaacgtttattatcttttttaagtccaaaagagaaagatgtgctgcgaaatggaaaagggaagaaaacgagagaagtggaggaaattgagcgtggccaagcgtcgcaagaaaccgcaggaggaacacgttgatgaaacgtggttaattccatatagtgatttgctgacacttttacttgcgctattcatcgttctgtttgcctccagttccgttgatgctaagaagtttgaacaaatgggaaatgcatttaagaaaattgtagaggaaggcgcggcaggcaatcaagcatatgtatccaaagaaaaaggaccagatgatcctaatgtgaatgcagtcttgaaggcgatggaagagcaagataaaaagaaagaagcaaccgaacaagagaaagccaaaaaagcagcagcggccttacttaaaaagcaaaacgaagaaaagattgaagcctttaaaaaacaaattgatagttatattgcagcagaacatttgggagcaaaaatgacaacgaaatactcggatgaagggcttttgataactatccgtgatgatattttattccagtcaggaagtgcagaattaactgcaggaaaacgcgagattgccaaagaaatcggcgaactttttgcgcaaggaaaaggaacgatggaagggattgtttctggacataccgataatgtgccaataagcacctcaatttactcttccaactgggaattaagtgtcgcgcgcgccgttaatttcatggaagcaatcattcaagaaaatagcgaagtaaacccaggcgagttcagtgctcgcggctacggagaattcagacctgtcgccaaaaatgatatcgcagcaaatcgcgaaaaaaatcggcgtgtagaaatcatggtacgcccaattaatcgcgatacgctagatgaagatgagtaggtgaagtgtttgcaactttttttaagtggttcgcatacgttaaccgactatgacaaacaagaaatacaagcatacctcgaaaaatttgcaccagtgaaccacattcacttgctttgttataagtcgattgaaaatgaagtgttacaatttttcttgaaaaaagagcatctggcaccgcgactatcgatttacacttttgcaccgaaagaatgtttgccagagccgtttttatcgacgatagactatctggaatgtctaggcagtagctatcagtcatttggttattttgatacggtgattactaagccgacttatgagaaattcttagcacaaattgttagtaaaatggatttggtttgttgtttttataacggggataagccgactgatgtgataccagtcgatgtcgcgaaatcgttcgatgtgcaaagtatgatttatgatttgccaaaagcgaaaaaacatctactgcaccgagcgagcagcgataaaataaaattagtgaattaattgatagaaagagggaagattcatgcggccgttaatttcgatttgtatgatagtcaaaaatgaagcacatattttacgacaaagtttagcgtcttttagaaaatttacagaagaaatcattattgtagatacaggttccactgacgaaaccaaggaaattgcacaagaattcactgattttgtctatgactttgaatggactggcaacttttctgatgcaagaaactttgcggccaaacatgcaacgggcaaatggattttagcgattgatgcagacgaatgtttggaagaagaaagttatcgcaaattagaaaaacagttaaaatcaccaatcgaaccaattcaaatggcgcaaataattagctttacaggggaaaaagggcgagtgacaacaacgaaccaaatggcgagggtttataaaaatgacggaacgatttgcttccgtggcgtcattcatgaacaactagaagcggtagacaaacacccgattgcagctggggttgctgaagtaaaaatttatcattatggctatatgacggagattgtcgaaaaacaagacaaatcagaccgtaatttacgtttattagaaaaagaagtaaaaaacaataaaaatagcggatttgtacattttaacattgggcaagaaatgaaccgacttggtaataagaaggaagcgctgaaagaattttccgaagcgttccgactacgtgaccacaatcactacatttgggcgaaactaagtgcttatcatattgccgaactactcgaacaagaaaaacgctatgatgaaagcttggccattatcgaagaagcaagaatcatttggccaaacgtaccagagttcccactaaaaaaagctaatattttatatgtgaatcaccaactcgaagatgcgaaagaaatttatcaaagtctgctagaaaatacagcaattgactaccaatcaatcgtgctttacgaagcaaccaatttcatgccacacaaaatgctcggaacgatttacttagaagaaaaagattatacgcgcgcgatgactcatttttctaaagcctatgcggaaaatagttctgattacggtgtgatgttccaaatgattatgctgcttagcaaattccatcaaccaaaagaaatttttgcctttatggaacgtcatcactttatctctagcacagaaactggtttgcgcttactttcgatgacaacccaacaaggctacgcagaattatctgaactaattgttcaatcgctaactgatgtgtatccacctgtcgcagaagcaacagaggtgaagattgcaacaatccgcaacgtcttcccggtaattagcgaatctgctattttattcggtattaaagaagagttgattgatgcagctgacttatgtttgtggcactatgaaaatccgcaattaccaatcgaacgtgtcatgaaaaatagcgatgttggcgacatttatgattttatctttgaaaacggtccacgaattagcaagaaacgttatttatttgtattagagcgggcgattgcacttggaaaaggcgagtttgctgattacttattggcacttcgtaacgtttatcatgacagcattaatagccacattgcagatttatttttccaatatgattttgcggatatcgcgctcgatttctacaatatcgttgacgcagacgaagtgaccaaacaaggctatatcaacctaattaattatttagtagatgccgaagtactggatgaggcacttgcgattgcagaacgtggcattgataattttagtactgatttccgcttttacctttggacaatcaaaattgataccgaaaatcgcgcgaatcgaattagtgaggcaatggacgaatttccgaataaccgctatttagcaaaactgttggatgaagtgaccatgcttcaagacactgttacaaacaatcgataggaggccagtaatatgacagaagaaaaaggaattttactacaaagtggaacaaatgaattggaaattgttacatttactgttggcgaaaacttattttgtattaacgttttaaaagtgaaagaaattattcatccgctcgaagtaacgcccgtgccagattcgaacccggcaattgaaggcgtttcccaagttcgcggcgaaatcatgccagttgtgaaccttgcccgtgtgatgaaattgccagaaattgagccagaaaacacgaaattcattatcacagaactaaaccaaatgaaaatcgttttccgtgtcgatgaggttcatcgtatccaacgtatttcgtgggaacaaattgaagaaccagaaaaactatcgattggtttagaagaattagcagtcggtatcgtaaaattagacggcaacttagtactcttattagattatgaaaaaattatttacgaaattagcggaaatgctgattttgctgtcacaggtgaagaccgtatggcgcgaaaagtaaatcgtgaagagaagacgatttttattgccgaggactcacaaatgctgcgccaactgcttgaagatacgcttcatgaggccggttatacaaatctgcagttctttgcaaatggtcgcgaagcacaagagcatattttcaaattgctcaaagaacaaaaagaacaaacgtttgaaaatgttaacttattaatcaccgatattgaaatgccgcaaatggacggacatcatttaacaaaagtaatcaaagaagatgaaattggccgtgaattgccagttgttattttctcttcgttaattacagaagatctggaacataaaggcgcaggtgttggagccgatgcgcaagtaagtaaaccaaatatccatcaactcattaatattttagatgagctagttttgtaaaaagaagtgtttgaacaaccttttctgttcaaacacttctttattttatttaaaaaaataatttataaaaacgtaaaaacgttgataataagccgatttcctatttttatataaataaaaacaacttattttcgcatttttaataaaaaaacatttgattttttaaaaaaatgaagatataataaagcatatagagaagagaagtcttttctaaaccgaatgtaggagggaaacacaaatgaaagtaaatactaatatcattagcttgaaaacacaagaatatcttcgtaaaaataacgaaggcatgactcaagcgcaagaacgtttggcatctggtaaacgtattaacagttctcttgatgacgctgctggtcttgcagttgttactcgtatgaacgttaaatctacaggcttagatgcagcaagcaaaaactcatccatgggtattgacttgttacaaacagcggattcagctcttagctccatgagttcaatcttgcaacgtatgcgtcaattagcagtacaatcttctaacggttcattcagtgacgaagatcgtaaacaatacactgctgaattcggtagcttgatcaaagaacttgatcacgttgctgacactactaactacaacaacatcaaattactagatcaaactgctacaggtgctgctactcaagtaagcatccaagcgtctgataaagctaatgacttaatcaatatcgatcttttcaatgcgaaaggtctttctgctggaacaatcactttaggtagtggttctacagttgctggttatagtgcattatctgttgctgatgctgattcttctcaagaagcaacggaagctattgatgaattaatcaataacatctctaacggtcgtgcacttctaggtgctggtatgagtcgccttagctacaatgtatctaacgtgaacaaccaatccatcgcaactaaagcatctgcttcctctattgaagatgcagatatggctgctgaaatgtccgaaatgactaaatacaaaattcttacacaaacatctatcagcatgctttctcaagcaaaccaaacaccgcaaatgttaactcaattaattaacagctaataacatatcaaattcatttatc

SEQ ID NO: 3820 - DNA, 5312 bp, Listeria monocytogenes 4b
  misc_feature (1)..(end): n can be any nucleotide: a,g,c or t/u
gactgaaagccactttacaaacgaatttgtgaacatttcacctctggagtcgccccccgagaaacactttatgtgtgaaggtggtccggttactaagccgttatcgaattttgagtgggaacaattttttgttcttattagggtggtaccgcgagaagtctcgtccctttgtggatagagcttttttattttgtctaaaaagaaggagtgaacggtatgttagaacagttacagacgctgaaaaatgaagcagaaacgcaaattaacgaagcatcagacttaaaaacattaaacgacttacgggtaaaataccttggtaaaaaaggcccgatgaccgaaatcatgaaacaaatggggaaactttccgcagaagaaagaccaaaaatgggttcacttgcgaatgaagtaagaaccgcattaacagaagcaatttcaagcaaacaacaaattttagaaacagaagcaatcaatgaaaaactaaaatcagaaaccattgacgttacattaccaggtactgctccgagtattggaacaaaacacttgctaacacaagtaattgaagaaatggaagatatgttcattgggatgggttacgaaattgcagaagggccagaagtagaactagattactacaacttcgaagcgctaaatttaccaaaagatcacccagctcgtgatatgcaagatagcttctatattacagaaaatactttactacgtacccaaacttcacctgtacaagcaagaacaatggaaaaacatgacttctctaaaggaccaatcaaagttatctgtccagggaaagtgtaccgccgcgacaatgatgatgcaactcactcccaccaatttacgcaaattgaagggctggttgttggcgaaaacatcacgtttgctgacttaaaaggaacattaactgttctcgcaaaaacaatgttcggtgaagaacgtgaaattcgtcttcgtccatccttcttcccattcacagaaccatccgttgaaatggatatctcttgtttcaaatgtggcggtaaagggtgccgcgtttgtaaaggaacaggttggattgaaattttaggaagcggaatggtacatccaaacgtgcttgaaatgtcgagaattgattccacgcgttacagcggttttgctttcggcttaggacctgaacgggttgcgatgttgaaatatgcggtggatgatattcgccacctttatacaaatgatttacgctttacgaagcaattccaaagtacagaaacgggggaaatctaatgttagtttcatataattgggtcaaagaatttttccaagacttcccgttaacggcggaagagctaggggaagcaattacaagaacaggtattgaaatcgaaggcgtagaagaattaagcgctagtttgaaaaatgtcgtagtcggcgaagttttatcatgcgaacgccaccccgatgcagagaaattgaataaatgtctcgttcaaacagacgaggtagaacctgttcaaatcatttgcggagctccaaacgttgccgctggtcaaaaagtaatcgtagccaaagttggcgcaagacttccaggtggacttaaaatcaaacgcgcaaaactacgcggcgaagtgtcagagggaatgatttgctccctggctgaacttggctttgaaagcaaagttgtaccaaaagcatacgcagaaggaatttatgtattacctgcgcacgtggaaacgggtgtaagtgcaatcactttacttggactagatgatgcgattttggatatggcaatcacaccaaaccgcgcagatgcattgagcatgaatggtgtagctcacgaggttggtgcgattattcatcaaaaaccagcacaaccaaccgagcctgacgtatctgaaaaaggaaaagcagacgatttcatttctgtagaagttgaaaatccagccgaaacaccttactatgctattaaaatggtagaaaacattgaaatcaaagaatcgccactatggctgcaaacaaaactaatgaaagctggcattcgtccacataataacgtggtcgatgttaccaactacatcaatttattatacggacaacctttgcattcctttgactatgataaaattggtagcaagaaaatcgttgtacgttctgcaaaagaacaagaagagattaccacgcttgatggcgagaaaagaactttacaggctggacatacagttattacaaatggcgtagaaccaattgctatcgctggcgttatgggtggagaattttccgaagtaacagagaacacaacgacagtagcgctagaaggtgctattttcagcagctcttccatcggtaaagcatctcgcgaattatacctacgtacagaagcaagcatccgttacgacaaaggttctgacgcttggaaagtagaaaaagcacttgcacatggcggagcgttaatcgctgaactaagtggcggaacactagtaggcggtgtcgtagaagtagataaccgtgaaaaagctgtaaataaaatcgaaacaagcctaacacgcattaaccgcattttaggaacagcaattacgcttgcggaaatcgaaacaatttttgatcgtttaggttttgtattagaagtgaaaaatgatactttaatcattgaagtgccgacaagacgttgggacattactattgaagcagatattttagaagaagtagctcgtatttacggttacgatgaaattccggtaacacttcctgcgacaagcacaacaggcggcttatcagacagccaaaaagctcgtcgtgtcatgcgcgcttatttagaaggagcaggacttaaccaagcattaacttactctttaacatcaaaaaaagatgcaactcgtctagcgctttctgatgaaaaaacagttgcattatcgatgccaatgagtgaagaacatagccatttaagaacaagtatcgttccacaattaattcgtagcgcaagttataacatcgctcgtaaaaatatggacgtggcactttacgaaatgggtaccgtgttctacgcaacacaaggggacaattgaccaattgcgcaagagcatttggcaggtctaattactgggaactggcatacggttgattggcaaaaaacaccaaaaccagtagatttcttcgttttaaaaggaattgtcgaaggtttagtgaacaaattaggtatcaaatccgaacttcactggaaacaaacagaaaaagaagaactgcatccgggaagaaccgccagccttattttagaaggacaagaaattggttatcttggagcacttcacccagcggtagaagctaactatgatttaaaagaaacatatgtctttgaaatcaatgtagctgctttactagatgcaaccaaagaaaaagttgtgtaccatccaatcccacgttacccagaaatgactcgcgacttagcattgcttgtggataaaaataccgaccatgcaacaatttctcaagtaatccaagagcacggcggaaagttacttgtcgatatcgagctatttgatattttcgaaggggagagtcttggcgaaaataaaaaatcgctcgcatacacattgactttcctagatagcgaaagaacactagtcgaagaagatgtacaaaaagcaaccaataaagtaatagaagcattacaagaaaaactacatgcgattattcgctaaatgaagaagaactaagctagctggaaaacattttcaactagtttggttctttttttgttttttataaaatagtggaagtctttccttttttagtacttcacttacttaaataacacatgttataatgatggcacatgccagagaaaaaaggacgagaaaaatgacctatgtagaaatgaaagatgtatctaaatactatcaaatgggcgagaacgttgtcacggcaaatgataaaatcactttcgggataaaaaagggtgaatttgttgtaatagtcggaccttctggagccggaaaatccactgtacttaatatacttggtggaatggatagtgcaagtgaaggcaaaattatggtagatgggcaggatattgctcaatataatgcaaaacaattaaccaaatatcggcgaacagatgtcggctttgtatttcaattttacaatttggtacccaatttgactgctaaagagaacgtagaattagctgcccaaattgcgccaaatgcattagacgcagaaactgttttaactcaagttggattaagtcacagattagacaattttccagcacaactatctggcggggaacaacagcgtgtcgccatagcacgtgcgcttgctaaagcaccgaaactgcttttatgcgatgagccaaccggggcacttgattacgatactggaaaatcagtcttaaaattattacaagaaacttgccgtaacacgggaacaaccgttattgttattacccataacacagcgattacgccaattgcagatcgaattattgaaattaataatgcaaaagttcgcagcatcaaagaaaatccagaaccaatgtcgattgatgatttagaatggtaggaaggagcaaccagtgaaacgttcagctttatggaaagatatctaccgcgaaatatggcgttctaagagccgctttatttccatttttatgctgattatgttgggtgttgcttttttctccggacttaaagcaactggacccgatatgcttctaacagccgacaattattttaataagtatgaattagctaattttaacgtgcaatctacttatggactagatgagacggacaaggaagcacttgaagatatatctggtgtcgcacaagtggaactcggatatacagcagatactttaatgaaagataaaaatatcgtaacgaaactattttctacatctaaaagcgataatttaaatcaatacaagatagctagtggccgtttaccagaaaaatcaggggaaattgcactggatgacaatgaccttgttcataaaaatgtcaaaatcggcgacgaagtaacttttgttaaaagtgatggaaataagttaactaacacgctaaaaaaatcaacttataaagtagttggcttcgttagctcaccagcttacatccagaaatctgaacgtggctcgagcacggttggaaaaggaaaaacagatgcctttggtgtgattccagaacaggattttgatttaccagaatacactattgctaatcttacttttaacaatttagcagcanaacaagctnttagtgacgaatatgtatgcacccaccaaagaaatagataagaaaagcgtcgaaaaagctttagcagaccacccagaaaaa

SEQ ID NO: 3821 - DNA, 5636 bp, Listeria monocytogenes 4b
  misc_feature (1)..(end): n can be any nucleotide: a,g,c or t/u
aaccctatgggcactctacagcatgtgcgagcggccgaccagtgtgctggaaagaaattataccacgcatattggcaactacttgaattatcttcaaacagccaaccaagtagtttcaaataatatcgccaatgccaatacgcccaattttaaagcaagtgaagcgagttttgaggaatcatttggctcaagtttgcgcgcatctggtcagaatagcaccgagtcggccggcaacctaacgaaaacaaacacaaaacatttagctggaaccgatatagacgaaacaaatgcaaaagtaacgaccaagagcggctccatcaacgaagacggcaacaatgtcaacgtcacttctgaaatgattagcttaacaaaaaataaccaaatgtacgcgctcgctatcagtgcactcaactataattcatccatcaacacagcagcccgtggaaagtaaggtgataaaccatgtttgaaggaataaacacaagtggctccgcgttaaatgctgcgaaacaatggatggaagtaagctccaataatatcgcgaacgccgattcaagcgccgcacctggcgagacacctttccttagaaaacgcgtcgtattatccgaaatcacaccatttgaaacagctctaactggaacaaaaggtgttaaagtaagcgaaatatcgagcgacacaggaagcgtcaaacgtgtctatgatccaactcatcctaacgcaaatgaagcgggttacgtcaattacgcgaatgttgatatgacagcagaaatgaccaatttaatggtcggacaaagaatgtacgcggcaaacacttccgccttacaagcaaatgaaaaaatgatggaaaaagatttagaaattggcaaagtataaaggagtgttttaagaaatggcaattgaaagtattaatgcagcaagtgtcttacctaaagtaacgcttggtgaaaccgcgaaaacagacaatgcgacaggtgccggaaataccttcacgcaaatgctggatagtatgagtgatacacaatcaaacgcgcaaacttccgtatcgaaccttttaacaacaggcgaaggaaatgcgagtgatgtactcattcaaatgaaaaaagcagaatcagaaatgaaaactgctgcggtcattcgtgataatgtaatcgaaagctacaaacagcttttaaatatgcaagtgtagcggttagactagtcgggggagttttagtcaatcgtccacacgagaaaaatggagcgaagtttttaagatggcaaaaataaaaacaatgtattcgaaattgaagaattggcacaaaggcgcgattttagtcggcctttttgtcgtagtcacggtgttattactctacatgaacacgcccaaaacagaagttactctttataaaaatctatccgaaacaagccaacaacaagtcaccgatcaattagccaaaatgggcgttgattataccgtcgacaaaagtggtaacattttagtcgatgaaaaagtggagacactcgttcgtgacaaatttgcggacctaggtattccatacacaggccaagatggcaatgacattctactaaacagctcacttggagccagtgaagaagataaaaaaatgcaagaaaaagttggtacgaaagtcaatttagaaaaagaaatcgttcaaagctatggaacaaccatcgatagcgcctccgtgcagctaactttaccagaatcaagttcgatttttgaagaagcaagccaaaaaggaacagccgcagtaacactcaaaaccaaaaacaatcaaacactaacaagcgaacaagttctcggcattcagcgcaccgtcagcgcagccgtaccaaatgttgctagtgatgacgtagcgattatcgatacgaaaaatggtgttatctctgaagcagacacatccaaagaagaaggcagttctgcttataaaaatgaagtcgatatccaaaatgcgattggaaaaaatgtgaaaacagatatcgaagggacactttccagcatttttgccctagataatttccgcgtgaatacaaatgtctcggttaattttgacgaaatcaaacaaaatacggaacattatccaaacgacggaaaagtacgtagcaaccaaaaagacacatcaacagacacatcaaaaggttccgcgaatacgacggaatcaggaaccgcctcaaacgctgacgtaccaaattacacggaacaaaatggtgatgatacgaacacctatacaagcgaaaaatcaagtgaaacaacgaattatgaactagactccaccatccaagaaatcaaaaaacacccagccctagcaaagacaaatgtcgttgtctgggttgatcaaaatgctttaaataaaaatggtgttgacatggccgaattcacaaaagcaattggagtttcagctggattaacgcctaatatgacaaccgaagaagcgggcgcagacggagaagcagcagccgcaccaacattcgaaggtactttccaaaatggcgatgttaccatcatgccgatccagttcttagacaacgccacgccagcagaagaagatacaacagaaaaagcagcaccagcaagcaaagcctggatttggtggcttgcaggaagtttactcttcgccatcattgcagctggaattatcgcctacattatcttccttaaacgtaaagaacaactagaagaagcattagaaccagaagaaaaagactacattccagccgaagaagcaatcatcaacccagaagaacatccagatttcaacttccaaacagatgcattcgatttatcagaaccagaattaaaagcccgcaaagaaagcttgaaaaataaactcggtgaaatggccaaagaagacccagggcgcgccgcagcagtcatccaaaaatggctcaatgaaaggcaggaataacaatggcagaaacactcaaagaaaccttagaagaaacaaatgctgaactagaaactgtcgaagtagaagaaacggaagaaaaaacagctacttcagcagattcaggtatttcaagacgtgaaaaagccgcacttattatttggagcctcgacgaacaaatcgcgaccgaagtggtagatttgctccctgacgcatccaaacaacgccttgcacgtgaaatggccaaaatgaaagaaatggacggcggcgcagtagaagaagcaactagagaatttttaggggaattagaacttctttcaggaggaattgctaaactcgaccgcgaacacttacaacgcttgttcccagacatgacgacggaagaactaaatcaactcatttacggggtagaagcagaatcacgtatcggcgaaaccgcgctagatattttacgagaaattgatgatgttgactccttgtttacaattattagcgacgaatcgccacaaaccatcgcgatgatagcttcatacatgaaaccagaagaagcatcgaaactactagccttactaccggaagaaaaaatgattaacaccgtcattggtatcgcgagcctagaacaattcgatagcgaagtcatgcaaaacgtttctaacttgctaagaattaagctcgataccatgtcgaatagctcactgaacaaaacagatggcataaaaaatgtcgcaaatatcttaaacaatgttacccgaggtttagaacgtacaattttcgaacatctcgacgccgaacaagccgaactttccgaacgcatcaaagagaaaatgtttatgtttgaagatattattctacttgataacatgaccttgcaacaagtgttggcagaaattcaagacaacaataaaatcgctcgagcactcaaaaacgaaaaagaagagctcaaagaaaaaattctatcttgcgtatcgaaaaaccgtcgcgatatgattaccgaagaattagaagttcttggcccaatcagactttctgacgtcgagcaagcccaacaagatatcgccaatgtcgttaaaaatctggaaaaagatggcaaaatagttatccaacggggggaacaggatgtccttatctaatccgcgaatcccaaaaggtaaagtcactttatccgacgtgaaaatggaactgttttatttggatgatatagaagaaacagaagaagtcgagtcaccctactcgaaagaacttgaacaactagaaagtcatcaaaaagaactggaaaaacacctatctgccatcgaaatcgaacagcaaaaattagctaacgaaaaagcagcacttcaagctgaacgccaagccattgaagaattaaaacgcgaagctgaaacagaaatcgaagcaaacaaacaagcttttgaaaaagaaaaaacacaaatgtatctaactatcaccgatttcctttgggatgaaagtatcgatcttgcagaaagaatcgtccaccaagcaatcgacacgcgccaaatcgaagtcttaccaatgctaactgaagtcattcaaaaactcccagttgctttcgacaaactaaacgtcaccacccatccagagaccttaaaagctctaaaagaagaaaacacaggcacaaaatacgactggcttttagaaaatatccattggaacttcgatatgcgactcgattacggcgaatttactgtagaagaagaaaaggaatacttcgactaccgcatcaccgaaattttccaaacacttcataaacaaaacgccgaacggaaaattctaggaggcgataaaccgtgaactggtcgccaaaaaccaaagcttggcaagaactaaaaaacaccgttccatacatccaaaaaggaaaaattcacacagtccaagaacaagtctatatttccaaaggccctcaagtgaaaattggtgacactgtcatggtcggtgaaaataaagtgctctgcgaagtaatttctattgaaaaagaaaacaacatgctactcccgtttaatcaaagcgacaaagtggcatacggtgattgggtgtacgtaacggatacgaaaattacaatcccggcagacgaatacctccttggaaaagtactcaacgcatccggcgatattttaaacgaagaagctggagtggctaaatttaaacaaaaaatgccgcttgaagctccaccaattcatgcttttagtcgagcagaaatcactgatacgctcgaaacaggcatcaaagcaattgacgggatgttaacgattggaatcggtcaaaaaattggtattttcgccggatcgggtgttggtaaatctactttacttggaatgattgctcgtaacgccaaagcagacattaatgtgatcggcttagtcggcgagcgcggccgtgaagtaaaagatttcttgcgtaaggatcttggagaagaaggactgcccccaagcgtgattgttgctgccacctcggacgaaagccatcttatgcaactacccctcgtcctctaccccttcctatagtcaactataccccacccttttgatcctccccccgctcttctccgtccgtcgcccttctcccaccccccctttttcatttcttttttttatccccccattccccttgctcactcccaatttgttctatacctcttttcaccgccaccactattttttcctccctcccgccccccacatctctacgctccgcgctcgtcctcgatatctttccccattctctacctcccccgcg

SEQ ID NO: 3822 - DNA, 3912 bp, Listeria monocytogenes 4b
  misc_feature (1)..(end): n can be any nucleotide: a,g,c or t/u
gcctgctgatgcagaaaaacaacaagtatcccaaagtgaaattgttcaagtgaaaattaacggtgacagaccactaatttttgatgatgttgttgttcggattagccctgattttgctacatatatgcacattgattatgacgaagccaacgcatgtggttttaaaaagggaattcgaggtcaaataatcaagaaaacaaaggctaaatgagtatggaactagacgcactcataaaagctgtcactgaggaagtcatgagacgattacaacttccagagaaaaaaatgattatcatgggacaagattcagaacacactctcagacagtgttatctaaaagaatatcaagtttcgctttatgatcgttcggaacgcgcttgtgacattttactactggaagaattggatatcgctgaattagctcgaatcagtttgtttgctccgatgaataaaaaagaacaatttattacagatcatcttttagcagggcggccaacttggataatgaagagtggtatcaaagcgcatgcttataaacgttccgctaaatatggtatcagacaactttttcaagaatatgaggagaaactgagccgatttggtgtcgaatttatcgaaagtccggtaaaagagaccaaagaaagtaaagtcatcaccgaacaggatgttgaaaaacttactaagaacaaaagcgaattcattttgcctaaaggaagtttcttaacaccacttgcaaaagattacttacaggaaaaacgaattagcattaaagaaagttaggaaggaagagcggcatgcaaattggaaaagttaccgggagtttatgggcaacaagaaaagacgaaaaactgaatggtttaaaactactactagtagagatttgtaccgatgaaacggaagatgtaagacattccatagtggcagctgataatgccggagcaggaaacggcgatcttgtgctcgttacaactggtagcgcagcacgagcatccactggggacaacacgatcccagtggacgcatgtatcgtcggcattatcgactcggtagaacgttatggctgaacagtccttaggtattcttgaactcaggagtataagtaaagggtacgaaatggccgatgttttcttgaaagcaggcaatgtaactttatttacttttcgtccgacatgtcctggtaaatttttgattattttgcaaggtgcttccggtgaacttactagtgcgatgcaagatgcaaaagaagaagctggcaaatttcatgtttcttcttatattttgcatatggcgcacgaagaattacttgcttttctaaacaataaacaccctaaagtggaagttgacgcagtaggaattatcgaaatcagtcagttgggcgctggactaaatgcagtaaatgaagcgctgaaaaaatcggctattcatttgaaacgcatgacgctcggtgcttcgattggtgggaaatttgtggctgtttttacaggggaagttagtgctattcaagaagggatgcggattctaatcgaaaccgccgaaccaaaaaaggtgatacatcatacggtcattccttctcctgatgaacttttaaaacgctatctatagaatggaggaacacttttgagcattaatgaaattattatttatttaatggtaatctttatgattctaggagctattgacaaaattatcggcaacaaatttggcttaggtgcacaatttgaagaaggtattatggcaatgggatcgctaacgctagcaatggtcggtatcattacattagcgccagttttagcaaaaattttaagcccgattgttgtaccaatttatacggcgcttggggctgacccggcaatgtttgcaacaacgttacttgcgaatgacatgggtggttttgcgctagctcaagaacttgcgctaactcccgacgctggtctttttgcaggagctattttaggatccatgatgggacctactattgttttcacgattccagtagcactaggaattattaaaaaagaagatcacaaatatttagcaactggcgtattatctggtattattacgattccaattggttgtttaatcggtggacttgtagctggattctctccaatcatgattttcaaaaacttagtaccaattattcttgtagctgcccttattatgttaggcctttggttcaaaccagaaggcatgattaaaggcttcacgatttttggaaaaggggtagtaatcgttgctactattgggctagttgctggagctattcaacaacttactggattaactattattccaggaattgcaccaattggcgaaggtatcgaaatcgttggtggtatcgcactagttctagcaggagctttctgtttagtttttgttattacaaaagtgttcaacaaaccacttatgaaaatgggtaaattgctaggtatgaatgaagttgcagcggctggtatggttgcgacacttgcaaatagtatcccaatgttccaaatgctaaaagatatggatgagcgcggtaaaattattaacgttgcttttgccgtatctgcggcctttgttttaggggatcatctaggtttcacagctggggttgcccaagatatgattttcccgatgattgtcggaaaacttgtcggaggagtaactgccgtagctgtcggtatctatatggctaaccgaatgatgaagaaaaataaagcaaaagaacaaacggcggtgaaagataatggctgatattagtaaagaattaattgagcaactagtaaaacaagttgtcctagaaaaaatgggccaaagttccaaacacgttgatccaagtggtattctatcggtgaaacttcctgtagtaaaagtttcagaggaagatcgattagacacaggaaatcctagcgatgttgtttatacaaaagacttagtaacactagaagaaagtaaacgtctaggttttggtttaatggaaatgaaagatacaactttcgattggttcttggattatgatgaagtagactacattatcgaaggcagactagatgttgtcattgatggtcgaactgtttcagcaggtccaggagaaattattttcattccaaaaggtagccaaatcaagttttccgtaactggtgaagcaagatttatttatgttacttatccggctgattggcagtcataataataataaaaaacgatttcggctttggctgaaatcgttttttattttaaggagtcgcgatattcttttggtgtcatatcgaattcttttttaaagactttgcaaaaatagcttgcccttgaaaaacctaaatttttagcaattgtatggaccgcccagtcacttttttctagttgttctttcgcatagagcattttttgttcgttgacgtaattaataaaattaatatttaattcgtttttaaataatttacttaaataaaacgggcttagatagacataattagcaacttcttctaatgtgatggagcggtgaatgttttttttaatgtaacgaatagcttgcttgatttctttatgctctttaccagttttgtttacgctagtggtttcttttcttggttgtttttgtttttcatgtgcagagtaataatcgcttaaaacatcaagcacttcaacggtttcaagtgaatgaagtagggcagagtgatctggattttttttgttgaaatcttcttgaatttgttgggtgaattggctctctacttgactatccatcaaaggttgaatatttacaactttttctttctccaaagttcttccctccctgttttatttctgcactaattataccataaaatcgctttaaataacgtttaatcctgcattttaaatagaacaataaattcttttttataacaaaatattgtcattttttaaatctcaaaaatagaaatt

SEQ ID NO: 3823 - DNA, 5635 bp, Listeria monocytogenes 4b
  misc_feature (1)..(end): n can be any nucleotide: a,g,c or t/u
gagctaaacgaaatgtcgctagatcaagctattaaaaacatcatggaagacgagcaagacgactatatggaaaaattagtcgaaggcgtaatggcgaataaagctgaaattgatgctatcattgagcctaatttagataattggcgcatggatcgtttgagtaaagtcgatctatccttacttcgactaagtgtctatgaaattaagtacttggatgatgtgccaaatagagttagtttgaatgaatccatcgaaattgcaaaaatttacagtgatgaaaaatcaagtaaatttattaatggcgtacttgctaatattgcaccggaagataaataagcttgattgagtgcaagggaaatctcttgcactcccttatttcgtgattttttaagaataattacgtgcaacttatttttaaagggggcaatactcatgggagaaattattgatggcaaaaagttagcaaaagaaattcaagaaaaagtaacaagagaagtagctgaattagtaaaagaaggtaagaaaccagggcttgctgttgtgctcgttggcgacaatcaagcatctcgtacatatgtaagaaataaacaaaaacggacagaagaagcggggatgaaatccgttttaattgaacttccagaaaatgtaacagaagaaaaattactatctgttgtagaggagcttaacgaagataaaactattcatggcatactcgtgcagttaccactaccagaacacatttcagaagaaaaagtaattgatactattagctatgacaaagatgttgacggtttccatccagtgaatgtaggtaatttattcatcggaaaagattcttttgttccttgtacaccagcaggaattattgaacttataaaatcgaccggcactcaaatagaaggcaaacgcgctgttgttattggtagaagtaacatcgtagggaaaccagtagctcaattactgttaaatgaaaacgcgacagtaaccattgcgcatagccgtacaaaagatttacctcaagtagcgaaagaagcagatattcttgttgtagcgacaggcctagcgaaattcgtgaaaaaagactatatcaaaccaggtgcggttgttattaatgttggcatggatctcgccgaaaataataagttatgcggtgatgtggactttgatgatgtggtagaagaagcaggatttatcacgccggtaccaggtggcgttggcccgatgacaatcacaatgctacttgcgaacacattaaaagcagcaaaacgcatttggaaaatgaattgattaattggatgtgaaatgatggagcaagataaatatttgacggtagcagcaataaccaaatatatcgaaaaaaagtttgaagtagatccctacatgaagcaagtttttgtgcgcggtgaaatttctaatttaaaacaaccagcgagtggacatctatattttacggtaaaagatgaatttgcgatgcttcgttctgtcatgtttcacaaagcagttcaaaaaattggttttgtcccagaagatggtatgaatgtccttatcacaggacgaattggcgtatttacaaaagctggtcgctatcagttctatgcagaacatatggaaccagatggtgtcggagcgctttatattcaattagagcaattaaaatcgcaattggaaaaggaagggctttttgcggaaacgcataaaaaagtgcttccttctttcccgtctaaagtcgctgtcgttacgtccaaaactggtgcagctgttcgtgatatactaaccaccattcatcgaagaatgccttctgtggaagtgattgtttatccaactattgttcaaggggagaaagcggctcaaaaaattgtcgaaaacattggcaagattaatcagcgaaatgatattgatgttatgattattgggcgtggtggtggttcgcttgaagaactatgggcttttaatgaagaacctgttgttcgagcagtatatgattccgatgtacctgtaatttcagcggtcggacatgaaactgattttgcgttaagtgatttttctgcagatgtacgagccgcaacgccaactgcggcggcagaacttgctgttccagattatcgcgatttagaagaacgattagcagaacgtaaataccgtttgctcgcagtcaccagacaagcattagaaagaaaagaacggtcactagagcaacttaaacaacacttgattttaaatggtccgaaacatcaattagaacagcaaatggaacgtacagattatttttccgaacgattaaataatgctttttctaaacaaatatttgttaagcaaacagtttttgaccgattaaatgatcggctacattattaccatccgaataaagaaattgaactacaaaaagaacagatggcactacgacttcaagcattagaaaaagcgatgaaacaacttttgaaagacaaacaacaatctttctttcggcaaatagatgcgctagaacatctgagccctctttctttattgaaacgaggatttggtgtaacgtataaagagaatatgctggttaaatcagtgcaggagcttgaagtcggcgataatatccaagtgaaaatgcaaggcggacagatagaggcactcattaccgcgaaggaggaagatataagtggcaactaaaaagaaaacttttgaagaagcaattgcagaattagaaacaatcgtagaagcactcgaaaatggtagtgcctcacttgaagattctctcgatatgtaccaaaaaggaatcgaactaacaaaattgtgccaagataaattacaatcagcagaaaaacgaatggcaaaagtagtcacagatgcaggagaagaaattccttttgaagcggatggtgaataaatttgcaagatttaaccctttttctagaacaatataaaaaagtgattgatgagtcgctttttaaagaaataagcgagcgaaatatcgaacctagactaaaagagtccatgttatattctgttcaagcaggtggaaaacggattcgtcccatgctagtttttgctacacttcaagccttaaaagtaaatccgcttttaggtgtgaaaacagcaacggcgttagaaatgattcatacgtatagcctgatccatgatgatttaccagcaatggataatgatgactatcgtcgcggcaaatatactaatcataaagtttttggggatgcaactgcgattttggcaggagacgctttactaacgcttgctttttctattttagcggaagacgaaaatttatcttttgaaacacgcatagctttgattaatcaaattagttttagtagtggtgcagaaggaatggttggcggtcaacttgcagatatggaggcagaaaacaaacaagtgacattagaagaactatcatccatccatgcacggaaaacaggcgaattattaatttttgccgtaacttctgctgcgaaaattgcagaagctgacccggaacaaacgaaaagattacggatttttgcggaaaatattgggattggattccaaatcagcgacgatattttagatgttattggtgatgaaacaaaaatgggtaaaaagacaggggtcgacgcttttctgaacaaaagtacctatcccggattactcacgcttgatggtgccaaaagggcattaaatgagcatgttgcgattgcaaagtcagcgctttcagggcatgattttgatgatgaaattctcttgaaacttgctgatttaatcgcacttagagaaaattaatcataattatctagtaatttcaaatttttttcacatatataattcaaattgatttgcttttcctaaaataccgtgttatactaatgtaagattatttttgtgggtgaaagatacgattgtgaacaactttccatctcgtgccgttaagcaagaatagtaaataattagtgtgcataacacacgaggaggaacatgaacatggaacaaggtacagtaaaatggtttaacgcagaaaaaggatttggttttatcgaacgcgaaaacggtgacgatgtattcgtacatttcagcgctatccaaggcgacggattcaaatctttagacgaaggtcaagcagtaactttcgacgttgaagaaggccaacgcggacctcaagcagctaacgttcaaaaagcgtaattctattttttgaataagaaaaagcaaatcatttcggtgatttgcttttttatttgcctaaaattattttaccttgtttggtttaatggtgattgtttgctataataagaacaattaattgagaaaaaagaccttgcacacattcatgcaagtggctctttggaaagtgagttgtttttatttggatcttttaaaaataaaggatccttcctttatgaagcaattggatatacaagaattagaagcacttgcggcagatattcgcgcttttttaattacttctacttctaaatcaggtgggcatattggtccgaatcttggtgtggtagaactaacgattgcgttgcattattcttttaatagtccaaaagataaatttatttgggatgttggtcaccagtcatatgtgcacaaaatcctaactggaagggcgagccaatttggtactttacgtgagcacgggggattagatggatttccaaagcggaaagaatctattcatgatgtatttgaaacggggcacagctcaacttctttgtctgctgcagccgggatggttattgcgagagatattaaaaaggaagaattttatgttattccgataatcggtgatggcgccttaacaggtggcatggctttagaggctttgaatcatataggcgatatgggaaaagatatgatagttattttaaatgataatgatatgtcgatagcgccaaacgtgggagcaatccacaacatacttggaaaattaaggacctctgatacatttaagcaaacaaaagctaaagtcgatggtactttttttgaagagcttgggtttatgtatttgggcccaattaatgggcatgatatagaagaggttattactaacttggaattagcaaaacgcacaaaagggcctgtactgctccatatcgttacaaaaaaaggcaaagggtatcaaccggccgaattagactctcgtggcacctggcatggtacaggaccttataaagtcgaaacaggtagctttattaagccggctaagcgtgcagcgtcatggagttcagttattagcaatgaattaatacgtttggcagaaaaggatgaacggattgttgcgataactccggcaatgcctgttggctctaaattagaaaaatttgcgaaagctttcccagaacgcttttttgatgttgggattgcggaacagcatgcgacaacaatggcagcggggctagcaacacaagggatgaaaccgttccttactatttattccacttttttacaaagagcctatgatcagttagttcatgatgtttgccggcaaaagttgaatgtggtcattgggattgaccgggccgggcttgttggcgctgatggcgaaacacatcaaggtatctccgatattgcatcagtaactcgtattcagaacatgactattagcatgctttccagggcacgtcgccgctcgacatgaagcaagtgccacagg

SEQ ID NO: 3824 - DNA, 5463 bp, Listeria monocytogenes 4b
  misc_feature (1)..(end): n can be any nucleotide: a,g,c or t/u
aagagtcgcgccggaagtcacagctcgtttgaccttgagagtcgctctactagaaatgcttgcttcaggtgctgtagtagtggctgtgagtgatgttatcggagcggaaatggagccgaccggtaaacgtgttatcgcagggctaaaagacgaacttattaaggctgatttaggtcatattgaattaaatggaagtactgaagaaaatatgaacgtaacacaaactagtgtaggcgttcttgtaactggttttgcgactaaagctgcacttaagcttataaatgtgcacgaagctgcggtcttatttgcatttggcgaaccgattgttggagcagaagttttgcagaggatggcggagatgccagattatcatttagtgaaaaaattggtggagcatagcgatgtgcttgaagttgtgccggttgggtcgaaaggaatggcttatgaggcaaatactttagcacggcttaatgattgtactttcaaagccagtgacgtttttaatgaagcgaccatgaataaaactgcggggcctgcttctgttattttagtagcagttaaagcaagtgaagtaaaagcatttgagcagaactttccagcggctaaatgtttaggagagttgaggaattaccatgagtgagatgatgcttgtaactggtggcgctagaagtggtaaaagtagttttgctgaaaaagaagctaccaaatataatcgtgttttatatgtggcgaccggaattgcatttcaaaatgatacagagtttcaagctaggataaaaaaacatcaagcaacgcgtccagaacactgggatacttttgaagcatttaaagggattgctgcttatttggagcgaaatggaaataaatatgatgtaataatgcttgattgcgtaacgatgttagtaactaatttgtttttttcgttgcttggtgagcgcgagttgacaaatgagattgctgatgaagtagaagcgggaattcaatcggaagttcgcgcaattttaaaagcaggagagcaatcctcagccaaatttatttttgttacgaacgaaatcggattaggggttgtacctgaaaacaagttaacacgcgtctttcgagacattattggtcgtattaatcagcaaattgcaacggaagtagaagaagtctattttgtcgtgagtggcattccgaaaaggtggaagtaatatgaaaacattgattttattaattcaattctttacgcgaattccgttacctgtccaaataaatatggatgaaatcaacttgaaaaaagggagtgctttgctgccgtttgtcggggtgattattggcgcttggaattggctcatttttactttggtggcgcttttgatgcccttaccagttgcgattattgcggggctttttgcagaaattatcattactggcggttttcatgttgatgcactggcggatacggcggatggacttttttcttctcggaaaagagagcgaatgctggaaattatgaaagatagtcgtgtaggcgcgaatggcgtgattgcgatttgcttttattttcttttttatggctctttattcctatctgttccagatacgcaacaaattggttggttatttttcgttttaccgattgttgctaaaggcgtgacaatgttgctttttgcaaaaatgacctatgcgggatcgaaagcaggactaggttcgatttttctaggagttccttggtggccggttgtgattgcgcaggtgatcgtgttagttgcgttagggctgtttttctcatatattggcgttattgcttatgctggcgtgattctatttacgattatttaccgggcatttgtttataaacggattggtggtatgaatggggatacgcttggtgcgggtggacaaatgggacaacttatttgtttattttgtttagtgctgctttgggggttgatttaagtgcaacttatttttgtgcgacacggagaaacggactggaatgtagcgaaaaaatattgtggtcagttagatgtcgcgttaaatgaaaatggtattcgacaaatggagcaactccgcgaaaagctggagaattactcgatcgatttagttgttacgagtgatcttatgcgcgtgaagcagtcggcaaatattttaagtaacgcaaagacgcttcggtttccggctttgaatgaaatgaatttcggtgactttgaaggttatacatatcaggaaattagcactaagtttccaaaggcgtggaatgaatactgtaataactggcaaacggcactatttccaaatggggaaagttttccgatattttatgagcgagtagttgcgatattagaagaagaaatggaaaaatggcagcaacttgatacggtgttgctcgtgggtcatctcggtgttttacgagtcattgcgctttttttacaaaaacaaactatagcacaatattgggatatcgattttaagcaaggatgttattcgctctgggacaacaaatctcaacattttcttatttctaatcaatagtagatttttgttgtttcagatgaaaacgctttttttataaatactttgtggtaagatgtaggtagttaaataggtcttatgttggtggaatgtatgtacatttctgaaagaggaattcggtgtgataccgaaactgcccccgcaactgtaaggtggacaagaatcgagatagccactgtacgtttttagcgtatgggaaggttcgattgttggatgaagccaagtcaggatactcgccaaataagccggaagcaactctttttcggggtcctaaaaagcgtatgcgcggtcgtatagcttatttgctgtgcataaactctcattcgatgacggatgaaagtttttttgtttttcaggcaacaaaaaagtcatattcctaaagggaagagaacatgacttttagataaaacttattttaatgtttcgcggtagccttttggcgtaacttcaaactctttccggaagactttacagaaatagcttgtttgtgtgaagcctaggttccgtgcgatattatcaatggacaaacgtggatttttcaacatttctttggcaagtgacattttcttttggttcacataattgatgaaattcacattcatttcttttttgaataacttactaaaataataagagctaaggtacacatgacttgccacttcatcaagtgtaatcggtcggttgagatttttctcgatatacttaagtgctttccgaatttctttattttcttcatgatgcgctatttttgcatgatgaaaaacaattttttgcttttgctcttcccggcttttttccatttcggatttcaagtaatactgggagataatcgtgagcatttcggcagaagaattaattttcttggagctgaaaacagggacagagcgaaatgcggagatgagctctttatcatttttccaatcggtttcttctgcttgaatattaccaacttcgctactttcttcacaaataacctggccactaagtaaaaatccgctaagttggttttcgacgacgatgggaactgagaaatctgttaacccggcgtgacatcgataaattaaaggctttccggttttggaggcttccagtccaccaaacatatcacatttttggcaaagggagcgatatttgggattggagcgaataagttggcaaaaaggagtaaagttacataatctagaaacttcggtaccgtgtatatctacaacaacggaggctaaactggttgcggctgagaactcatccattactttttcaatgagcatttcgttgcttttggactgtagtaacatagctattcccctttcggcgagacttggcgtgtttctgtcgttcttagtatagcatatttataatgcgcttacattttcttgccatgaagataacaatatattgctaagagtaatttcataagagaaagcccaaaccatgcattattggatggctttttgtcgttattttttttggaggcgcaaaattgtgttaaaacacgattggcgtcttctttttttctatttggaagcggcaactatttatattccggattgcctatactgagagagtaaaatacttattttgagaaggaggtacacccatgcaagaagcactaggcttagttgaaactaaagggctagtcggcgccattgaagccgctgacgccatggttaaatcagctaatgtaacattaacagggtacgaaaaaatcgggtctggactggttactgtcatggttcgtggcgatgttggtgcggtgaaagcagcgacagaagcaggagcggcagcagcaagaaatgtaggtaccgtgatgagtacacatgttattcctcgtccgcatactgatgtggaagaaattttaccagtgagggtgaagtcagatgagtgagcaaaataaactaattgacgaaattctaaaacaggtaatggaaacggttaatgatgccccggaaaaactagtagaggatggaggatcacgtcaaatgagtgaaaaagcagttcaattaacagaatttgtaggaacagcaataggagatacaatcggcctagtgattgcgaatgtagacggacaacttttagaagcaatgaagcttgaaaagtcttaccgttctataggtattttaggagcccgtactggtgcaggcccacatattatggcagcagatgaagctgtaaaagcaacaaatacagaagtagtaaaaatcgaattaccacgtgatacaaaaggcggtgcgggtcacggttctttaattatctttggtggtgatgatgtttctgatgtcaaacgtgcagttgaagttgcactgaatgaattagataaaactttcggagatgtttacggcaacgaagctggacacatcgaacttcaatatacagcgcgagcaagtcatgcacttaatacagcattcggcgcacctgtaggaaaagcattcggtcttatggttggtgcaccggctgggattggcgttgttatggcagatactgcagtgaaatccgctaacgtagatgtcgttgcatattcctcgccagcagatggaacaagtttctccaatgaagtgattctttgtatttctggagattctggtgcagtccgtcaagctgttatttcagcacgtgaaattggtaaaaaattacttggagctttaggggatgaaccgaaaaatgatcgtccatcctacatttagaacggagggtaacgactgatgaaatcaaaacgctttgaagaattagcaaaacgcccggtcaatcaagatggttttgtaaaagaatggattgaagaaggcctaatcgcaatggaaagcccgaatgatccgaaaccaagcattaaaatagaaaatggaaaagtagtcgaaatggacagcaaaaaactcgctgactttgacttaattgaccatttcatcgctaaatatggcgtcgatttatctcgtgcggaagaagttantgcaatggatt

SEQ ID NO: 3825 - DNA, 4914 bp, Listeria monocytogenes 4b
  misc_feature (1)..(end): n can be any nucleotide: a,g,c or t/u
agttcgtccgccagtgggtgccaaggctcgtggcagtgtgcccatgcgcgaccatagccagtgatcatcatcggcatgttcatttgctagagccagatgcagctagtattaagattgatcaggttcgcgcgctgaagcaagaacttagtaaacgcggggtggaatcagatcaaaaagtagttatcatttacgatgcagaaaaaatgactgttcaatcagccaatagtctgctgaaatttatagaagaaccagaaggcggtttgttattattatttttaacaacaaaccccgggcaaattttgccaacgattcaatcaagactgcaacctgtcacattcaaatcactgacttttgatagtttactcgcatcactaacagcagcaggcatttccgaacaaaaagcgcggatttatgctagcattactgggagtgtggaagaagcgaaggcttttgaagagagtgagtggtttagtgaggcaagaaatgttgtcatcaagttatatgaaggaattcaaaaacaaggaaccagcccattaattatcattcaagaatcatggatgccactttttaaagagaaagataagatggcgcttgggctcgaattattgttactgctgtaccgcgaccggctacaccttacacttgacgagaactacgaacctatttgtactgcgcaaaaagaaatgctcggacaagatgcgctgcgtaaatcactgtccgaaaccacaggggaaatcgagaagattctcgctgcgaaatcaaaactggattccaatatgaacacgcaacttctaatggagcagttagttctggaaatccaagggaggtaatcgctatgcttaaaattgtaggcgtccgttttaaagacgttggtaaaatatattatttctcacctggcgaactggaaatcacagaaaaccaaggtgttattgttgaaaatgcacaaggaattgaatttggtaaaacagtcattgaaccgcgctacgtggacgaagaagatgtcgttttaccacttaagaaagtactgcgtatcgcaacagaagcggattataaatgcgttgctgagaatggcgactcgtgtcagaaagcctttttactttgtgatgaaaagatccgcgagcgcgaacttgaaatgagtttagttgatgttgattacacatttgaccgtaataaagtcattttttatttcaccgcagaaggtcgcgtcgatttccgggagctcgtgaaagatttagcatctgtttttcggactcgcatcgaacttcgccaaattggtgtacgtgatgaagcgaaattgctcggtgggattggcccatgcggtcgtatgctctgctgctccactttcttaggtgatttcgaaccagtttccatcaaaatggcgaaagaccaaaacctgtcccttaacccaacgaaaatttctggtttatgtggacgattaatgtgttgcttgaaatatgagaacgatgaatatgagcaagctaaacgtgaaatgccagatgttggtgtaaaagtaaaaactccagaaggcatagaagcacgtgtttcgggaatcaacttgctgtctagaatcctacaagtgagtttgcccgaagaagagacggttatagaatacgagttggatgagttacgtccatataacgaatttctaaaacaaccggcaaagtcttgaggtgaaaaaattggataaaaaagctatttttgactcagtcagtaatatggaggagcaaattggcgaattgtatcagcaacttggagatctaaagacaaacttaggcgaaatgttggaagaaaataaccgattaaaccttgaaaacgaacatttgcgacgcagactttctttgacggatgaagcgacaccagaacctaaagccgaaatagaggcggaacacggtgtgatggcgcctaatcgtaaggaagcaatgcagcaaatgattgaacttggggaaggttatgacaatcttgtccaactttacaaggaaggatttcatgtttgcaatgtacatttcggcagcccgcgtggtaatgatgaagattgtttattttgcttatccttgctcaataaaaaataacatgacgggcctttctcaattcaagagaagggctttttgctagaaaaggtgaatcatttggaaaaactcgaattaattggtgatgaaagactagattatttactagcagaaaatttgcggattattcaaagcccatcggtattttctttctctatagacgcggttctcctcgctaaatttagttatttaccaatccgtaaagggaaaataattgatttgtgtagcggaaatgggattattcctttactacttagtacgcgaacaaaagcgaaaatagttggtgttgaaattcaagaacgtctggcagatatggcgaaaagaagtgttgcttataatcaactggaagaccaaatcgaaataatcgaatatgatttgaaaaaaattacagatcttattccaaaagagcgcgcggacattgttacctgtaatccaccttattttgcaaccccggatacaagtttgaaaaataccaatgaacattttcggattgctcgccatgaagttatgtgtacgctagaggatactattcgtgtagccgcaagccttttaaaacaaggtggaaaagcgaattttgttcatcgtccggaacgattactagacatcattgatataatgagaaaatatcgcttggaaccgaaacgcattcaattcgtgcacccgcgctcagatagagaagcgaatacggtgcttgtagaaggaatcaaagacgggaaacctggcgtgaaatatgttccacctgttatcgtatatgatgagctaggggaatatacaccagtaattaaggagattttatatggcgaaagcgagtgaacatttcttttatgtgctaaaatgtagtgacaattcctattatggtggctatacaacagatgttattcgccgagaagcggaacataatgcgggaattagatgtaaatatacaaaaacacgtcgcccggtaaaagtcattcattttgaaaaattcgaaacaagaagtgaagctacaaaagcagaagctgcgttcaaaaaattatcacgtaaaaataaagacgcctatttaatacaacgggaggagtccgaatgataaaaagccaaaagagtttcagtggagccagccaaggagcattatatttagtgccaacgccgattggtaatttagaagatatgacttttcgtgcaattcgcatgcttaaagaagcggatattattgcagcggaagatacgcggaacaccgtgaaacttttaaatcattttgaaattacaacccgaatgacgagctaccatcagtttacgaaggaaaataaagaagataatattattcagcggatgttagacggtgaagtggtggcgcttgttagtgatgcggggatgccatctatttctgacccgggatacgaacttgttcaaagtgcgctaaatgctaatattcctgtcatccctctaccaggagccaatgctgcattaactgcactgattgcatctggtcttgccccgcagccgttttacttttacggatttcttccacgccaaaataaagaacgtactcaagcgattgaaaaattagcggcgcgcgaagaaacgtggattttatatgaatcaccacatcgtttaaaagaaacactaaaagcaatcatcaaaatcactggaaatgatcggaaaattgtcttgtgtcgagagctcacaaaaagatttgaagaatttttacgtggaacggttgaagatgcgttaaactgggcaatggacgaagaagttcgcggagaattttgcttgattattgaaggaaatgccaatccaccgcttgcagaagagcaactctggtggcaagaactcgatattaaaacgcacgtaagcaccgtaatggaacaggaaaatgttagttctaaagatgcaattaaaatggttatgaaagcgagaaatttaccaaaacgagaagtttactctgcttatcatgaaataaaataaaatcatgcgcgaatcctttaatgggaactcgcgcatgattttttttataatgtatcaccaaagcggcgtttaatttcttccattaattccgcagcgccttctttactgagtgtcaatttaccgtccacaaatttcttgttatcaacagaaaattctccggtaacgtcacaaaccaagccagcggaatactttttcaatacaatcgcatcttcatctgtaaatatttctaaagggtcttttacatttaggttcatcgttcttcttatttcaatcggtataaccacacgaccaagttcgtcgatttttcttaccattccagttgatttcattttctcaccttcttgataattttaattcattttaacagataattacgggaataggaatgatttcatgaggaaaagggtatagaccataagcagaagaattagggggaataaaaatgaacatagttatcgcattaattccggcagtgatgtgggggattatgccattagttgtttcaaaaattggcggtaaaccgaggcagcaaatcattggtacaacattcggcgcactagctttcgcaatcggagtttttatttttacaaatccagaatatacagcaaccattattattgctagttttatttcaggggcattttggagcttaggtcaaatgaatcagttccgggcatttacacaagtaggcgtatcaaaaacaatgccactttcgacaggaatgcagttagtaggtacatcgctttttggtgtatttgcttttcatgaatggggtacaacttccaaattagtattaggattttccgcattagcattaattattatcgggattttcttaacaagttatcaacaacataaagacgaaaattccggccaaaatatgaaaaaaggaataatcacttta

SEQ ID NO: 3826 - DNA, 3753 bp, Listeria monocytogenes 4b
  misc_feature (1)..(end): n can be any nucleotide: a,g,c or t/u
aactgtgggcactctcctcgctgcttgagcggccgacagtgtgctggaaagtgggacgacttttccgattgaccgagcctacagcgctgaattacttggtttttccgctatctatgaaaatagtttagacggcgtgagtgatcgtgattttattattgagtttcttagtaacagttctatcttaatgatgcatttatcgcgtttttgtgaggaactgatactttggacgagtcatgagtttcaatttgtcgagttaacggacgctttttcaacgggaagttctattatgccgcaaaagaaaaatccagatatggctgagttaattcgcggtaaaactggccgggtttacggaaacctgttcggcatgctaacggttttaaaaggtctcccactcgcttacaataaagacttgcaagaagataaggaaggcatgtttgatacgcttgagacggttcaaacaagcttagatattttcgcaggaatgattgaaacgatgaagatcaacacagaaataatggaagaatcgacacaaaaagatttttccaatgcgacggaactagcagattatttagcgaaaaaaggcgttccatttagagaagcgcatgagattgttgggaaattggtgcttgaatgtacgcaaaatgggatttatttgcaagatgtagcgcttagccactatcaggaaataaatccacttattgatgatgatatttacgtggtgctttcctctaaaactgccgtgcaaaaaagaaattcttacggcgggactggatttgatcaaattaaagttgctctcgaaaacgcgaaaaaaacattgtaaaactaactgggatgctgaatggcgttccagttttttgctgacttctccccctttttcctcttacatgatttgtcagagcactactttttttgttactattaaaaagaatgttacctttttgctaacatggggaaatagatacagagaatataaagggaagtgatgtattgaaaaaattaacaagtgttttttggggatcgggttgtcttgttttattagccgttttatttggagcctttttgccaatacaatttgaagcttttacaaccaatatccaaaaatttctaacaagtaattttggttggtactatttaattgttgtagcgattattattatcttctgcttgtttttagttttaagtccgattggctcgattcgcctcggaaaacctggtgaggaaccggggtatagtaataagtcttggtttgcgatgttgtttagtgctggaatgggaattggcctcgttttctggggtgcagctgagccgttatctcattatgcggtccaagctcctggcggtgaagtcggcacgcaagcagcgatgaaagatgcgcttcgctattcattcttccactggggaatttctgcttggtcgatttatgcgattgtcgctttagcactggcttacttcaaattccggaaaaatgcgccgggtttaataagtgccactctttatcctattttagggaaacatgccaaaggtccaattggacaattgattgatatcatcgctgtttttgcgacagtcatcggtgttgcaacgacacttggccttggcgctcaacaaattaatggtggtcttacatacttgtttggcgttccaaacaattttactgtccaatttaccattattatcattgtcaccattttatttatgttatcggccatgtctggacttgataaagggattcagcttttaagtaatgtaaatatttatgttgctggagttttattagttttaacccttattcttgggcctacccttttcattatgaataacttcaccaattcatttggtgactacttacaaaatatcatccaaatgagttttcagacagcccctgatgcgcctgatgctcgaaaatggattgactcatggactattttttattgggcttggtggctttcttggtcaccgttcgttgggatttttattgccagaatttcgcgcggtagaacgattcgccaattcttgctcggtgtcatcgtgttgcccgctttagtcagtgtgttttggtttgccgtatttggtggctcggcgatttttgtcgaacaacatggaaattctgggctttcaagtttagcaactgaacaagtactctttggggtatttaatgaattcccagctggcatggtgttatcgattgttgcgatgattttaattgcagtcttctttattacttcagcagactcagccacatttgttctcggtatgcaaacgacgggcggatctttaaatccaccaaactccgtcaaagtaacatggggcctactccaagcaggaatagcaagtgtgctactttatgcaggaggactcacagcgcttcaaaacgcatcgattatagcagcctttccattttctatcgtcattatcttaatgattgtttcgttattcgtttcgttaacgagggaacaagaaaaactcggcttatatgtccgaccgaaaaaatcacaacgttctcaactataataaaaagggatgaaaatcgacaactagattttcatcccttttttcatccttttttctgctttgccgcgactatttcgcgatagctacgagtttgtttaggatatttttttcgaaagaaatgttgcgaaacaactgctaacacgagagaaatggcggtaattggaatagagcttttaaatataccgaccatcagtaataaagcactggcaaataacgttgcattaaaaaggaatttttccattagttactcctccaaattataatttaattcgcggtcatgagctaatttttttatacctaacgcatcaaatactaacgctttttctgcaatataggcattgtattcaatacgctctagcatgtcgtatgctttatgaagtgatgtatctaatacgacaataccgtgtttatttaataaacttgcactaggaacagctttatctcctagttcgataacgtgtttacgaacgatttccgcaagttctggactagtcgctggcgcaaattcaagtgttggaatttggccaattttttgcgttgcttctgttaaattcggtaattccattccaagtgtggcaaatagcatcgattcttttggatgagcatggagtacacaaccaatttttggattttctacgtaacaagcgcggtgtaagttaatttctctagtaactcttccgtctccttctacgacttcattgttattatccactacaaggatttcatatggggaaagatcgcaaagttttgcttgactcatgagtgtaggtgtcataataatgtgctcactattcatgcgcacacttacatttcctccagctgcattcgtttcaaagcggtcaaacatcgtcttcactatttttgctaaatcttcacgttctttttggtataacatattatctctcctccaattgtataatgcttacttgattcttgagttttccagcagcttctaaatcaaagctcgaactgtcttgttgcatgactttactagcggaacaacctgtcgcgacttttaatgtttcagtaattggcatgttcatcgcaagtcctgcaataaatgccccaacaaacacatcgccagccccagtatcattgcgttcctgcacttttggtggaataacttgatacaacttgccattatgcgcgcaaacgtgatccttttgctccaagcgaaacgactagatagggactttccagcacagtggcggccgctcaagcatcgaataggtgcccacagtc

SEQ ID NO: 3827 - DNA, 5818 bp, Listeria monocytogenes 4b
  misc_feature (1)..(end): n can be any nucleotide: a,g,c or t/u
gactatgcgaagggaggttccgtcatgggtcgtagtttgaaaaaaggaccttttgttgatgaccacttgatgaagaaagtggaagcagcagcagaaagcgaaaagaaacaagtaattaaaacttggtctcgtcgctccacgattttcccaacttttgttggacaaacaatcgcagtatatgatggacgtaaacacgttcctgtttatgttcaagaagatatggtaggacacaaactgggcgaattcgcaccaactcgtacgtaccgcggtcatgcgggcgacgataaaaaaactaaacgctaatttgagaggaggatatcctaatggcaagtgaagttacaagcgcaaaagccgttgccaaaacggttcgtattgctcctcgcaaagctagaatcgtcattgatttaattcgaggcaagcaagttggcgaagcaattgcaatcttgaagtatactccaagatcagcttccccaattattgaaaaagtattaaaatctgctattgctaacgcagagcataactatgatttagacattaacaaccttgtagtagaggaagcatttgttgacgaaggtccaacacttaaacgtttccgtccacgtgcacaaggtcgtgcaagtgcaatcaacaaacgtactagccacatcacagttgtggtatctgaagtgaaggagggataattcgtgggtcaaaaagtacatccaataggtatgcgtatcggtgtcatccgtgattgggactccaaatggtacgcggaaaaagattatgcggacttcttacatgaagatttacgcatccgtgattacgttgcaaaacgtctatctgacgcttctgtttctcgtgtagaaatcgaacgtgcagctaaccgtgtgaatatcactattcatactgcaaaacctggtatggttatcggtaaaggtggttctgaagttgaagcattacgcaaaaacttgaacgaacttactcaaaaacgtgttcatatcaatatcgtagaaatcaaacgtgctgacctagacgcaaaattggttgctgaaaatatcgctcgtcaattggaaggtcgtgtatctttccgtcgtgcgcaaaaacaagctatccaacgtactatgcgtgctggagcaaaaggtatcaaaactcaagtatctggtcgtcttggcggagcggatatcgctcgtgctgaacactatagcgaaggaacagtacctcttcatacattgcgtgccgacatcgactacgcatgggaagaagctgacacaacttatggtaaactaggcgttaaagtctggatctaccgcggtgaagtccttcctacgaagaaaaacaatgtggaaggaggaaaataataatgttagttcctaaacgtgtaaaataccgtcgtgaattccgcggaaacatgcgtggacgcgcgaaaggcggaactgaagttgcatttggtgaatacggtcttcaagcagttgaagcttcttggattacaaaccgtcaaatcgaagcagctcgtatcgcaatgactcgttacatgaaacgtggcggtaaagtttggattaaaattttccctcataaatcttacacttctaaaccaatcggggttcggatgggtaaaggtaaaggtgctccggaaggttgggtaagcccagtcaaacgtggcaaaattatgtttgaaatcgcaggtgttcctgaagatgtagcgcgtgaagcattacgtctagcagcacacaaactgccggtcaaaactaagatcgttaaacgtgaagaaattggtggtgaagcaaatgaaagctaatgatatccgtgatttatccactaccgaaatccaagatcaagaaaaagctttgaaagaagagctcttcaacctgcgctttcaattagctactggtcaattagaaaacaccgcacgtattcgtgaggttcgtaaagcaattgcccgtatgaaaacaatcgttcgagaaagagaacttgcttaaaaaagaatcgtaaggaggttttaatacatggctgaccgtaaccaacgtaaagtttatactggtcgtgttgtatccgacaaaatggataaaacaattaccgtggttgttgaaacgtacaagaaacatggtttgtacggtaaacgcgtgaagtattctaaaaaattcaaagcgcatgatgaaaataacattgcaaaaactggcgatgtagttcgtatttccgaaactcgtccattgtctgcaactaaacatttccgtttactagaagttgtagaagaagcagtaattatctaaatcaaaagttaaaaatagattgtgaaaagttgccgagtgcaatttttccgacccgttattctggaaggagggtgtcctaatgattcaacaagaaagtcgtatgaaagtggctgataactctggtgctcgtgaagtgttaactattaaagtactaggtggatcaggacgcaaaactgctaacattggcgatgttgtcgtgtgtaccgttaaacaagcaacaccaggcggcgttgtcaaaaaaggtgaagttgttaaagcagtaatcgttcgtactaagagtggagcacgtcgtcaagacggttcttacatcaagtttgatgaaaatgcatgtgtcattatccgtgacgataaaagtcctcgtggaacacgtatttttggacctgttgctcgcgaacttcgtgaaaacaactttatgaagatcgtttctttagctccagaagttctttaaaaaataagttccaagaaatcaaggaggtgctataccaatgcatgtcaaaaaaggtgataaagtaaaagttattactggtaaagataaaggcaaatccggcaaagtgctcgcagcatttccgaaaaaggaccgcgtacttatcgaaggaatcaatatggttaaaaaacatacaaaaccttccaacatcaacccgcaaggcgggatcttgaatgttgaagcaccaatccacgtttcaaacgtaatgctaattgaccctaaaacaggcgaacctactcgtgtaggatacgaagttaaaggcgataaaaaagtacgcgtagcaaaaaaatccggtgaagtaatagataaataaaagtcgtaggaaggagggaatattacatgaatcgccttaaagatcaatatcttaaggaaattgttcctgctttaatgagcaaattcaattatgactccgtaatggaggttccaaaaatagataaaatcgtaatcaacactggtgttggtgacgctacagcaaatgcgaaagttttagacagtgcagttgaggagttagctcttatcactggtcaaaaacctgtaatcacaaaagcaaaaaattctatcgctggtttccgtcttcgtgaaggaatgccaatcggtgctaaagtaactttgcgtggtgaacgcatgtatgatttcttagataaattagttactgtttcacttccacgtgttcgtgatttccgtggcgtatcgaaaaaagctttcgatggtcgtggtaactatacgttgggtgttagagagcaacttattttccctgaaattgattacgatcaagtatcaaaagtacgcggtatggacgtagtaatcgttacaactgccaaaagtgatgaagaatctcatgagttactaactcaactagggatgccatttcaaaagtaatcaaaactaattttagtagggaggcgaaaacgtggctaagaaatccatgatcgcgaagcaaaaacgtacaccaaaatacgctgttcaagcatatactcgttgtgaacgttgtggtcgtccacattccgttattcgcaaatttaaattatgccgtatttgtttccgtgaacttgcctataaaggtcaaattcccggcgtgaaaaaagcaagctggtaagaaagagtttaaggaaggagggtattatacatggtgatgacagatccaattgcagattttctaactcgcattcgtaatgcaaacatggttaaacatgataaattagaactgcctgcatccaaaatcaaaaaagaaattgctgaaatattgaagcgtgaaggttttatccgtgacgttgaatatattgaagatgacaatgctggaacaatccgtgttttcttaaaatatggagcgactggcgaacgtgtaatcactggtttgaaacgtattagtaagccaggtttacgtgtatatgcaaaatcaactgaggtgcctaaagtacttaacggtctaggtatcgcaatcgtgtctacttcccaaggcgttttaaccgacaaagaagcccgtgctaaacaagtcggcggagaagtactagcatacgtttggtaagaaaaagtaaaccataaggaggtgcaataaatgtcccgtataggtaaaaaaactattgtgattcctgcaggtgtaacagttacacttaatggatcaacagcaacagttaaaggtcctaaaggtgaacttgtaaaagagttcaacccagaaattactattaatattgaaggcaacgaaattaacgtttctcgcccgactgataataaaaaccaccgtgcacttcatggtacaactcgtgctattcttaataacatggttgtcggagtttccgagggttatgaaaagaaattagaacttatcggtgttggttaccgtgcgcaaaaacaaggcgacaagcttgttcttaacgtagggtactctcatccagtagagtttgttgctcctaaaggcgtagatattgaagttcctgcaaacacacaagtgattgttaaaggatacaacaaagaacacgttggcgagttagctgcaaacattcgtgccgtacgtccaccagagccatataaaggtaaaggtattcgttacgaaggcgaacatgtacgccgtaaagaaggtaaaactggtaaataatgccgcttaattaggcaaatgagagaagaggtgagtcgtgtgattaccaaaatcgacaaaaataaagtacgtaaaaaaagacatgctcgtgttcgttctaagatttctggaactgaaagtcgtccacgtttaaacgtattccgttcaaacaaaaacatttatgctcaaattattgatgatgtaaatggtgtgacacttgcaagtgcgtctaatttagataaagatttcggttctgctgaatccaaagttgatgcagcaagcaaagttggcgaactagttgctaaacgtgcttccgaaaaaggtattacttctgtcacttttgaccgtggaggatacttatatcatggccgcgtgaaagctcttgctgaagcagctcgcgaaaatggactagaattttaataagaaggagggacatattacatgcctgagcaaattgatggaaacaaattagatttagaagaacgcgttgttacaatcaaccgtgttgctaaagtagttaaaggtggacgtcgtttccgtttcacagcacttgttgttgttggagacaaaaatggtcatgttggtttcggtactggtaaagcgcaagaagttccagatgctatccgtaaagctgttgaggatgctaaaaagaacatggtgcttgtaccaactgtagacacaactattccacacactgtagtcggacattttggtggcggagaaattcttcttaaaccagctagtgccggttctggtgtaactgctggtggtcccgttcgtgcggtcctagaacttgccggtgttgctgatgtatcttccaaatcgcttggatctaatacaccaattaacatggtacgtgctacaatcgacggaattaaacaactgaaaaacgctgaagatgttgcgaaacttcgtggcaaaacagtagaagaattgttaggataaggagggaattatcattatggcgaagttagaaattactctaaaacgtagcttaatcggacgccctcaacc

SEQ ID NO: 3828 - DNA, 5693 bp, Listeria monocytogenes 4b
  misc_feature (1)..(end): n can be any nucleotide: a,g,c or t/u
cacagtgcgctggaaagttcattattgataatatcaatcgtttcctcccataataaaatcatttttttgaattgttgatagattttttcgccctctttagttggttccacaccattcgagtgccggaagaaaagttgagtttggaactgtttttcgatattttttattttattggacatattagactgtatattatgcagttcgttcgctgctgcagaaatactctttagttcagctactttattaaatgctttcatgttttcaatatccataattttctccttttggtatcaaaaataatgataccggcatatgattttcgcatttcaaatgatagcgcagatagattatactttatttacaatataaattcaatttgggggttatgttatgaatacaaccattcaacaattggttaaacatgtttcagtaagagaatttaaaaatgaaagattatcagatgaaatcaaacaacatttattaacagctgcgagaagtgcatctagttcgcattttgtacaatctttttctattttagaaatcacagatgaaaaactaagaaaggaactagctgaaattacaaatagtgcttcttatgtaaatcaaacggggaccttttatgtgtttgtaggggatttataccgacaatcaaaacttttactggagaataatagaactttagatgggttgagaaatatggaatcattactcgtctcggtgatagatgctacaattgcagctcaaaatatggttattgctgctgagtctcttgatttaggaatctgttatatcggtggaataagaaatgatattgaaaaagtagctgaattgctaaacttaccaccatttacgatacctgttttcggattaactgtaggcgttccagaatataaaaatcaagtaaaaccacggctattactagaaaatcaagtaggagaaaatcaatatccacatgaacaatttacggatttaaaagcgtatgaggaattgaccaaagattattatgctttacgtgaaaaaaatcagcatcaaacttcatggggagacaagaatgtagcgttttttgaagaaatacgaagaccagaaatagctggctttttgaaaaaacaagggtttacattggattaattaattttcgttgtagggcgtataaaaaataatagtattaaatttatgagaggctggaagagtattttttccggctttttatttgattggggctattattttgtcatagaaagcttaaactagattagatggggatagatttgtataattaatatggagttaaaattacactaatatatccaaaataaatttcataaaaggaggatccaaatgaaatttctaaaaaaatacggtttttactttttattactcggcgttttgagtgattttctaacgccttacatacttgggattttttacccagaattaaatcaaatgacgcgggttatgagtgtgtttggggatgtggctagtccggtgcggggagcgtttttggtttggtcggtggtgtctggggtgttctttgtgctcgctttgccggcgatttatcagagcgttgttaaaacttcgcggactttggcgattttgcttgcttctgcgattggtttgtatgggattggcgattgtatttttaccgggttgtttagtattgacacggagcaggcgagttggacattttcgacttgggtgcataatattggctcggggctcggttatgcgggatttttgatttttccgttgtttctggtcattctttaccggaaaactggcgataaaacccgcagcaatatctatctagttttactcattgttagtttgctgtcggctggtgtttatgggcttgcgcggattcctgctgtgaatgacttgccggttttagataaaattggtttttgtcagcggattagtttcttttttaattacttaccgattgttgtttttggaattgatcggattagaaaaccctagattttttaggaatctagggttttttgttcgcaaagttcgataaattgctggaagtcttcttgttttgctagttttttgacgaagctgcgttcgtttaagatggttacgagttggccgaataattcttcaaaagagttatcgcgttcttctttcatagtgagtaataggacgagtttgacgcgatttcctccccagtcgattggtttatcaagtgcgcatacggcgacggcatttttcttcgcgcttcgctggatggcgtgcgggatggcgtagtagttgccgtaacaggtgctagataattgttcgcgctcaaacacttttgaaacatagtcggagtcgcagtagtcgaatgcagttaactgttcgcaaagaaacgtaattacttcttcttttgatttgaagttttgttttgggaagaacagctcttttttgaaaaattttctggaaatcgaatcggctttgggcttagtttctaaaatgtgcttgattttctgcaaatctgtttctgttaaaagtaaatcgtaatgatagactgggatgtcagttgttaggtttaatggttcggcggtgataattaaatggatttctttgtctaaggtgaactgctttatatcaaaaatagattgagaaacgagcaagtcaatcgaaaaatcggcaattttcttaagttgattatgaattaaacgttggctacctgcgccgtacggtgaaaccaagaggatttttctttttttaccgtgattaatcgtttccgaagcggataaaaaatgtagcgcgatataagcgatttcgtcatctgggaaagtgatcgcaagctctttttggataaaggctgaagcatagacgctgacgttataaataaatggaaacttattttttaattcttcggtgagtgggttggttaaatattgtttgtgattggctcttttgtatagggctgaaatatgggccactagataggtggctattttttcatcagcggaaaagtcgatatggaaattttggtccactgcttcaaggagccgagtgacaacgctgccaaaaacttgtgcgtcaatggttgaagttgtcgttagtttgccggaataaagccgggcgatatagcttaattcttgcgttggaatattgatttgcaattcattttctaacgtttcggctagatgctctgccatttcaagactagttttatcttgctcgagtaaagcagtgcgctctatatagctacccatactaatgcgctcaattaaaacggcgatatgcaaaatgaacgaaatcgtcgagaaatcattcataaaaaaatcgttctttttgtggtaggcaataataagctcggaaagttgctttagattgcagtaatcaaagtaatcggcgtatttatctaggcttaattgatggttttcgatttcctgattgaggaatagattgaagatgcggcgcttttcttcttcgccgccctcggttagtagttcgttgttttttcgaataatacaaagcgacgtatctttttcagcgataaccgcgttgagttctttaataatacgagctaacgtcgattcgctaatgaaaaattgatccgctaaatcatagaaattggtatgatcttgttcgataatatggcgtaataattcaaaatgtagattttcgctatttttggttagatttatttgtgaaagctgctcgtttggcgttagaaagtagccttttccagcttttgatgcgatgattgtggaactaaatgactggttaatttgcataatgtcatttcgcacagttttggaagaaacgcctaacatttctgaaagtgcttttgctgttactgtcttttggctgtcgttaagcttttctaacaatgaacgttgcctttctgaaatagtcattatatcccccctaattctcccttaacctattgttattatacaacaccaaatagagaaagagacgagtttttttgtcccaatctctatttaagtggttattaattagcagcgatgttttcttcttcggcttctttttctaaagcgacaaggtttttctcatacacttttaggaatgggtagtacattaggccgtttaagaaaatcaggatgaatacgagaacgatggctcgccagtccatggtggatagaaatgctccaattggtgcgggcatttgccaggagaagacggcgaacgtttttccgacaatcccgaaatacatacaaagatacgtgatgacaccattgaatacggatgtgaaaatgaacgggaagaagaaaatcggattcagcattagtggtgttccgaaaattagcggctcagaaattccgaatatggaaggtaagaagccgactttcccgacggtgcttagttgtttggacttggatcgcatcattaaaaaggcaagtgcgagaacggaaccagaaccaccgatgataacgaaatatgtccagaatggtgtcgtgaaaatattcgtcaaatcttgaccagccattttttcagcggcgttgatagaaaggtttccgtcacgaattgggcccaaaattccggcaagtgcggcatcgtgtacaccgaagaaccagaataagtgaactaggaaaatacttagaatcgtgaatggtaagctatcggctgctttgaagctcggcgccattttttcatataagaattggatggctgttgtgtctagtaggttgaaaatgataaagataatcgagaaaaaggtcattaaaataataccaggaactaaggctgcgaatgtctcggatagtgaggctgggacgctatcgggcatggttattcgaccgacattttttttgcgcatccagtgataaccttctacggtaacgatggcgacgaaaatcgagagtaatattcctcgtccatcaaggaaactgatgtcgacttctttgccgtcccaacccattttgattgggttaagtacgagcataaagaaaccggcgatagaaaacatgagtgggcgtaagaaatcttcgtggtagtgtttgcataaataatacgtgataccgacgcaaatatataacgacatggcgccaagtgtaattccgctaatccaatttaggattaaatcatatttttcagcgaagttagcccaggcaagcaggaagccgtttttcgtatcatctgttactggagccgctttcaaaataatcggaattgaaccaaacaatgtaattggcagcatggacataaaggcatctctggttgctttcaaatggcgttgctggctaagtttgttagccagcggggaaatatattgatccattttttcgctaatggtattaaatcgcatgtttttatcctcctattaatttctggatgtcttcgtaaacccctttgccgtccatgatgccgtattttactggtgaaatggcatggactgggacgctgacggcctgttttatttgtggcataaggaaacggatttgagggccgataagcacaaggtcgacgccgtccaaataatcggtatactcggattcgctataagcagtgacgtttaatgtgttgccagaagcggcttcgatttttttcgcaagcattcctgtagacataccagcattacaaactaacatgatatttttcattttcctgctcctttttttaaaattctcttcgtttgatgagttttccctgactttcaatcatttctttgaaccagtagtaggaagcttttggttttctgatttggttgttttcgaaatcaactgctacaagtc

SEQ ID NO: 3829 - DNA, 5101 bp, Listeria monocytogenes 4b
  misc_feature (1)..(end): n can be any nucleotide: a,g,c or t/u
aatcaatcaattttttgataaagattttgagagtgccaaggtgtttctacgtcaagcgagtcaatttatttcggatatttatgaaaaatatcgggactttatggtgatttctgttcgagaaatgggcagcaaagatatggaatttattgatccatcgattgtgcaatatttgtatgaacgggttaatcaaaaagtaaaagaaatggttccgagtaagaactctgcgcaagaagcagatgcgatttctttgattttaaatagtgttattttgcttattatggtggaaaaagtacgcgatgatatttataagcgcccgccaacgattacaacaaccgcagattcattagcagatgttttgttaaaattattgaaataaatcacgaaaagttaaataaaagttaagtatttaacattttgtcttgcgggcttagattttctatgttaaactcgtagacgattagagcgataataaatatgtagttttgcctgttaggtgaggctcctatgcaaacacaggccactgcccaaaaatgtccaaagacgccaatgggtagaacagggattgtcggattaaggctttccataatgtggctaagagtattctttacgttgcatagtgccaaaactttagcgaggggagtctgttttagtatgcgtataaactcagaagtccttgccaaggttttggtaaggacttttttcatgtttattatgaaaataattatctgggaattaaaatctttttttctgataattaagcttagataaaattcgaaaggagatgaaggcaatggaccaccatcagggagaggaagtagaagaaccggactcgtattatagtaatcaagctgcaagagtgactaaccttcatctctggcgcacataaacgttattctcagcttgcctagaaagaattggaggcaaggaaaatgaaaaaactacatgtaaaaaagcaaggtaacaatttgctcaaagagtcacaaataggcaaagaaaaagttttggaaaagttaggtgttatggaaacggggctcacaaacgtagaagttacagaaagattagcggaatttggtcccaatcaaactgtggaagaaaagaaagtatcaaatttgcggctctttattcgggcgtttaatgatccgtttatctatattttagcgatgttaatggttgtttcgtatttgacggacgacatggaagcgactgtgattatggcactaatgatacttgcgagcgggatacttggatttattcaaacaagtagagcagaacgggcgagttacgcattaaaaaatatggtgaaaaatagagtcaatgttattcgaaatggctccatggatttgataatgcaagacgcaatcgtacctggagatttaattgaaatttcggcgggggatattatcccagcagatgcgcgagttatttcggctacggatttattaattaatcaatcggcgctcactggagaatcgattcctgctgaaaaatttgtggaagacaaaagtgccaatccagaaatttttgaacgggaaaacctattatttatggggacagatgtgttaagtgggcatggtcgggcagttgttttgcggactggaagctcgacgttctttggttcgttgtccatcgcagctactgaacggcgcggcgatactagttttgataaaggtgttaaatcaatttcgaaattactattttattttatgatggtgatggtaccgattgtatttatgattaatgggcttatgaagggcaattggttagaagcatttctatatgcagtagcgattgctgttggccttacacccgagatgctacctatgattgtcagcacgaacttggcaaaaggtgcaatcaatatgtcgaagaaaaaagtaatcatgaaagaactgagcgccattcaaaatattggtgcaatggacattttgtgtacggataaaactggaacactcacagaagataaactagaacttataaaatacattgatagtgctggcgaaacctcagaacgcgtcttaaaaatggcttatttaaacagttacttccaaactggttggaaaaatgttttagatcatgcagttattgccaaattggatgagagtactgcagcagcttggaaaaaagttggcgagattccattcaattttgatcgtcgccgtttgagcgtagtggtcgaaaataaggcagaaacaaggatgattacaaaaggcgcggtggaagaaatgctcactgtatgcactcataaggaatttggaggtgctgtttcgacactatccgaatcggaaaagagcgaacttcaagacatgtgtgccgaaatgaatcgctcaggaattcgtgtgattgctgtggcttataaaactggaagagtcggagaagcatttactaagaccgacgaagaacaaatgattattgcgggattccttggtttccgcgatccagtaaaagcatcgacgaaagaagcaatcgctcatctttttaaaaatcaaattaacgtaaaagttttgacgggtgataacgaaattgttacgaaacgaatttgtcaggaagttggcattccagcgaacggatttttactaggtgcggatatagaagagctttccgatgaagaacttacgcgcgaactgcgaaaatatcacatttttgctaaattaaccccaatgcaaaaatcgcgaatcattggtttgcttaaaaaagcggggcatacggttggatttcttggtgacggaattaatgatgctccggctcttaggaaagcggatgttggcatttcggtagatacagcggccgatattacaaaagatgccagctcagtcatcttacttgagaaaagcttaacggttttaaatgatgcggtgatggaaggtcggaatgtattcggtaatattctaaaataccttaaaatgacggccagctctaactttggtaatgtgtttagtgttttggttgcgagtgcatttattccatttttaccaatgctatcgttacaccttttactgcaaaatttattgtatgatttctcccaattaacacttccttgggacaaaatggatcgctcatttttgaagaagccgcatcaatgggaacaaaaaggaatgttgcgctttattctgtgcattggcccggtaagttcgatctttgatattgcgacatttctaattatgtggtttgtatttagcgcgaatacggtggcggagcaagcattattccacagtggctggttcgtggttggcttacttacgcaaacattagtcgtacacatgattcgtacagagaaaataccgttcattcaaagtcgggcagctgcacctgtcatgattgcaacgcttagtgtaatggcgcttgggattattattccatttacaggattcggtcacagcattgggtttgtcagcttgcctggtagttatttcccttggttgatattgattttggttggctacatggctacgatgcaactggtgaaaactatttatattcggaaattccgggagtggatttaaatgcgggcaggacgcgtgctgtttgtaacgtatatacttctggcgatatggagtttgctacttgtttatagtacgagttatggtgttgctgttatgcgatacaaagtggagccgagttatttctttcataggcaattacttttttatgggcttggttttttaggactactcgtttgctcgcgcattaatgtgcaactattttacctgagacgaacgcttcggattttggctggaagtttgcttgggttactgctgttagtgcttctaacaggaagtgcggcgaacaatgcgcaaagatggctgtctattgcgggtgtgacgttccaacctactgagatggttaaattgctgctgatactagtaatcgcaacagtttttttgaaaaaaggttgtggtgttcgcgtgcaatattggttgcttggatttttgtttttaacagtggggcttgtcttcttgcagccggatcttggaactgcactgattttaggtgttattggggtcgctttgtttttaacaagcggagtcggcctcacacgccttgtgcgagtggctatttggtctttcggtctcttattacttgtagcaatgctgctttatttctttcacccagacttttttagttcagccaaattgggtagatttgcttttctggatccgtttaacctggataatttagatgcttcttatcaacttagaaatggctattatgcgattgggagcggtgggatatttggaaatggcttgggaggcagtatccagaagttaggttatttgccggagccgcatacggattttattatgacggtaattgcagaggaacttggtgtttttggtgttatttggacgatatttttgttgatgatgctaagttttacatcgctctatattgctattagtagtcattttatttttgattcgatggtttgtataggtgtttcttcttgggtgtcggtgcagatgtttttgaatcttggtggagtgagtggaattattccgcttactggtgtgccactgccatttattagctatggtggcagttcggttgtaatgcttacatgtgcaccttgatttgtactggtcggcggctagaccgaacctactatctcaaactagataggccctgcctccattaaaccagatgcgcttgatcaccggatcattttatcctgagttctcattgtttcccctttcatgcgaagcccgatattttgcacatttaccctcctctctatcgaattccttacagatgttatttgctctatactcccttcgctccccttaccttctttcctcctctcccctctcccttcgcatttttgttccacctttcatgcactccccctatattcatcccctcctttgcctcctactcttccccctgcaattttgtccgtatttgctcacactccattccttcattttatatctacacatcagtacttactccatatcgcttgtttatatcatctgtttcttctcttcctcatcgcccttcctctcttatcgcccatctctctcttttctatcttcttccacttttccccttcctccttttccgctcgtatgctcgccacctttgattatttttgtctctattttct

SEQ ID NO: 3830 - DNA, 4870 bp, Listeria monocytogenes 4b
  misc_feature (1)..(end): n can be any nucleotide: a,g,c or t/u
tattagacgcatgggtaacaaagactctgaactacaagatgcagcgaagaaaatggaaagccttaaaggcaaaaagagcagtatttcctccgttttcgaagctacagtagatgattttaattttaaaaatgttaaaagaatcgcttatgcctgtgatgcgggacttggatctagtgcgatgggcgcgaccgtactacagaaaaaaatcaaaaatgctggcttagaggatattaaagtgttccatatcgccatccacgaattgccgaccgaatgcgatgtagtcgtgacgcataaatcccttatcgaccgagccaaagaaaagcaaccagatgcgtattatgtagaaataacggattacctcggcgcaccagaatatcaagaactgatagataaaatagttgcagaccgagaacaaaagaattaacttatttgtaagcgcttctttttaggagcgctttgaatagtaaaatgggtaggaggaagacaatgttaaaagcgattgtgatggactttgacggaattgttattgatacagaagtagtttggtatgaaatttttaaagaatggtttaaaacgaagcagaattatgacctttctatcgaggagtttttgcagtgcgttgggtcaaatgtggacgatttgtttcgcgaactcaaccggacagagcaaatggatattaatcgacaagacttcgaagcagaaacacaagcaacgtttattgtaaacagtaaaagtttaccggccaaagaaggcgtggaaagctttattcgtgaattcttgatcgtggattattattagcacttgcgacctcatcgcagcgaccaaaaccactctatcatttggaacgactaggcttgctcggatattttgatgcgattattacggcggaggatgttacgcgaatcaagccggatccggacttgtttttagaagctttgagagcactggatgttaagccatcggaggctcttatcgtagaagactcgcgaaatggccttttggcgggaaatagtgcgggtgtccatgttcttgtcattccaaatgaagtaacaaaacatagtgatttaaccccgaactatttggagcgagagtcgctggcggaggtagatttaacagaaataatggctgaatataataaataagggggcgcgagcatgttattagaccgagttactttagaagatattgaggtaaatttaaaagcaaaagactggcgcgaagccatccaaacatcagcaagacttttactagaacgaggcgctatcaaagagagttatattgacggaatgattcaaagtgtagaaaataatggaccatatatagtgattgctaaacatatcgccctagcgcacacacgaccagaattcggcgtcattcgcggtggcctaacttttgcaacactggctgacggcgtggcttttggaagcgacatgttcgacccggtgaaactagttattacccttgcggcaacagactcagaaagccatttagaagtgttgtcagagcttgcagaagtgctcatggacgaggaaaaggtaacccgtttgatcgaagcaaattcaagccaagcgttttacgatgagttaacaaaagaaggataataatttcactaaagaggtgaagaaatggaaaattatctttgtgtcgacattggtggaacgagtatcaaatatgctaaatttaatcaagaaggtaagcgggtgggcgatcttaagtcttgtgtgacgcctataactggcggagcgaatcaaatcatgcccgcgcttattcggattgtcgaacaagaaaaaacgaatgtagcgggcgtctgtgtggcctctgcgggtgttgtggattctgtgaaaggcaaaattatttatgctggctacacgattcctaaatacactggaactgaaataaaagcagaactagagcaccgatttcatcttccgtgcgcagtggaaaatgacgtaaatgcagcctgccttggcgagttttggttgggtggagcacgggggcgtgggagcgtgctctgtttgacaattggaaccggaatcggcggagcaatgttactaaacgacaaactaataaatggatcgtcttttacagcatgtgaagtgggctatatgcacctttcacaagggagatttcaagatgttgcttcaacaaaagcattgattaaacaagtagcctcgcgaaaaaatatcgaggaaaatgcgttaaatggtcgtcaagtcatggaatgggcctatagcggagatgcagatgtgctggctgaaatagagcaatggattgagaatttagtcgaaggtgtagtaaacttaatctatattttcaacccagaagtgattgtactcggtggcggattaatggaagaagagtcattcttcaaaccgcgtctaaaagcggctatctcaaccaaattaatctcaccgatgttcgatacagcagatattactttcgcaaagctgggaaatgaagcagggatgattggtgcgctttatcatttcttaaaccagaaagaggccgaaaaagatgacgattttaaatgaaatccaacaaaattacaatcgattaccgaataaagaaaaacaaattgcgaagtatattttagaaaaaagtgatgaactcaagaatattaatattaaagagctagctgaagaaactggcacatccatttcgacgataacgagattttgtcgccatgtacgctgtgatagttttgtggatttgaaaatgcgggtgaatactgcagcgacaatggttccgtcacttggttatgatgacctttttgaagaggtttattcgttctaccataaagtaattgataacacggtgaagctgattgaaccagcgaagatccgtgaagtggtgcagtacattcaagaagctaagcgagtctatatttgcggcgtcggaagttcggggctcactgccgttgaaatgtcgcagcgccttattcgaatggggttaaacgtcatcagtgtcaacgatccgcatatgatgattatcactagctccatcacaacaaaagaagattttgttatcggcatttccaattcaggtaacaccccagagctagtcacggcgctaaaaatcgctaagaaaaacaaaagtaaagttgctacatttaccagttttgaaaatagtgaaatgaccgaaatcagtgacgtcactattccggtttacaatactttattcgtaagtaaaaggtattttgctaatagccagttttcgattatgtatgtgatggatattatttccatgatgttgctacaaaatgagtcttaccgcgacaatatggaaaaaaccatcaataccgttaccgatgaatttcattaagaaaatagataggactgtgaaactttagcagctctatctattttttcacatttaaaggacagaataagcgtgtttttctctagcatttctgctaaaatagtttaagagacttgcggatagccagataatatattaagaaaccccgagatgttccggaaaggaaggacccagatgcctttttcacgtttatttggaaaaaaagagaagaatcaaatggatgatatagtagaagaaggagtacaacgcgtacaagaacttcctatggataaaattttcccgaaccaattccaaccacggacagtattcgatcaagataagattgatgaacttgctcgaactatccgaattcacggcgttattcagccgattgtggttagagaaatggaaccggattattatgaaatcattgcaggcgagcgtcgttttcgtgctgtgctttctttagaaatggaaaaaattccagcaattattcaaaatttagatgatgaagaagtagcagcgattgcgttaattgaaaacttgcaacgtgaagaattgacgccaattgaggaagcgaaagcgtatcggagtttactagacatgcaggacgtgacacaagaagcccttgcgcaacgtgttgggaaaagccagtctgccattgcaaacaaaatgcgacttctaaaactaccagaaactgtccaagaagccgttcttaacaaacaaatttcagagcgccatgctcgttcgttactcgcattagaaacagaagaacagcaagtcgcaattttagccgaaatagctgaaaatcactggaacgtcaaacaaaccgaagcaagaattcaagaaattttgggcgtgaaaaaaccagtagctactaaaaaaaccaaaccaaaacgccaagctattagtcgtgacgtgcgtatcgctatgaatacgattaaacaatcggttacaatggttaaagataacggaatggacctagatttcaccgaagaagagacagatgatttttatcaaattaccattcaaattcctaaaaagaaataagaggtgtagcagtgaggtttttgaagataattggacatgcagttggtgtcattagttgtttgatggtacttccatctttcgtaatagcgattacaagtgctattttaagttttaatccactatatattacctactttttcactagcccctatgcccgagcagtagccgtagcagaagagtctggttggggaagtggcttcaacattctattaattaattacggggcatatctcatcgcatttggctatactttctttgcgatagtgaagatttacagttggtaccaaatcgcgaaagaagttaaaaaatagctgcaaaacctgcttattgaagcgggttttttattttcaaaaaaggaaagcaactcaattcgagtgggtttggtttattttgtaaaaaatagagaaaataagtgcaattttgagcagaaaaaagtacaatagaattaggtaaagttgtaaaggagggagtgattcactcaactctgagtggaatcacgaaacgaatggcaaaaatcattttt

SEQ ID NO: 3831 - DNA, 4910 bp, Listeria monocytogenes 4b
  misc_feature (1)..(end): n can be any nucleotide: a,g,c or t/u
atcggccgcaactgtgctggaaaggtggtgcagcattctcacagtttctaggtatttatggaattaatcttccagtaccagtttcttccttaatttggggagttatcatgttactttcagctatttatggtattcgtattttgagtattttaaattatatcgcagtaccagttttactatttgtatgtatttacggacttgttgtttctttaaacgatggcggactagctattgttgaaaattataaaccagcaggaagcatgtcgtttatgacaggactagcaattacaattggctcatttgcattaggtgcagtaatagcaggagactattctcaatatacaaaatcgcgtaaagatgttgtaaaagcagctattgtcgggattttgccatcaggtgtgcttatgattacggttggagcggtacttgcacttacggcgggtacagcagatatttctgtcgtatttacaaacttaggattaccagttcttggtattatcggtttgatacttgctgcatggacaacaaacgcagtaaatgccttttcgggaggtattgcgattatcaatgtatttaacatctctgaaaaatatcacaaagtagcagtggcagttgcaggcggacttggaacaatactcgcggttatcggaattttaaaccactttgttccaattatgtccgtactttcagcaatggtaccacccgttgcaggagtaatgattgcttcttactggattgtccaaaaaggtgacaaatccaaatgggcaccagtatcaggtgtcaactggcttggtgtaagttcttggctagttggtgcagtcattgcggggattccagtcattttgacatttttcccggagctaccacaattaccaaatcaaccacttatcggtattatcttgtcgctggctgtttacttgatcggagcgaaagtgctgagcgggaaaaccaacaatgtagaaaacttggagggaaaataaatgcgttatttagatgaacaagctattgaaaatatcgcgattggtgctgcgtttcttggcactggtggcggaggagatccatatataggcaagatgatggcattaactgcaattaaaaaacatggaccaattaaactgttatccccagaagaaattgcggatgatgattatttcattccagccgcgatgatgggggcaccgtctgtactcattgaaaaatttcctaaaggcgacgaattcgttcgtgtatttgaaaaattaggtagatatgtaggcaaagaagtaaaaggaacatttccaatggaagctggtggagtaaactcaatgatcccaatcgttgtggcggctcaactaggtttgccaatggtggactgtgacggcatgggccgagcttttccagaactacaaatggtgacgttccatctagacgggatttccgcaacaccaatggctatcaccgatgaaaaaggtaatattggcatcatggaaacgattgataataaatggaccgaacgacttgcacgtgtgacaacggtcgaaatgggcgcgagttctcttgtgagcctgtatccgtgtaacggcgcgcaaatcaagcaaagtagtattaaaaatatcgtgacgctatctgaagaaatcggtaaagtaatccgtgaaacttcgatggacgaagcagaaaaactacaaaaattattagatgtaacgcacggttatcatttattcgaagggaaaattaccgatgtagttcgggaaacgcgtgcaggcttcaactttggtcgtgtgaaaatcgacggactaaacaaagacacaggtagcgaagtcattgttcatttccaaaacgaaaatcttgttgcggagaaaaatggcgaaccgatagcaattacaccagatttaatttgtatggtagaccttgaaacgctgatgccggtaacgacggaagcgctcaaatacggaaaacgtgtccgcgtgatggcactaccagctgatgatgcttggagaacggacaaaggtatcgaaacagttggaccgcgctatttcggctatgatgtcgattttgaaccactagaagaacttgtcaaaaaggaggaacgccgtcatgtataaaattggaattgacgttggtggtacaaacaccgatgccgttattttagatgaaaatcaacaactcattcatagtgtaaaaatgccaacgagtgaagatattgaaacaggaattactgagtcacttcatcgcgtattgagcgaaacgggcattgatcgctcgaaagtaacgcacgccatgcttggaacaacccagtgtacgaacgcgattgtagaacgtaaaaaattagcaaaagttggcgttcttcgtttaggctatcctgcaacagcatccgttttaccatatacagcttggccggaagacatggttggctttttatctggaaaatataaattaactggtggcggctatgagtatgatggtcaggtgctatcagaaatcaacgaagcagaaatccgtgaaaccttagctagttggaaaggtgaagtggaatccgtcgcagttgttggcgtcttttcttccttgaaaaacgatcaggaattagctgttcaaaaaattattgaagaagaactaggcgcagatattccggtttcgatttcctcttccgtaggttctgttggactgattgaacgcgaaaatgcgacgattttaaacgcagcccttttcaaagttattgcggcaacgagtgatggttttgaaaaagcactagaacaagaaggaattgcgcatgctgaaatctatctttgccaaaacgacgggactttaatgtcactaaactatgcaagacaattcccgattttgacaattgcttgtggaccaacgaacagtatccgcggcgcatcctacttggcgggacttaaagacgcgatggttctcgatgttggtggcacgacttctgatattggagtgctgacggatggtttccctagagagtcctcgcttgcggttgatgttggcggagtgcgtaccaactttagaatgccagatattatttccatcggacttggtggaggaagtatcgttcgcgaaaaagatggcgacataacaatcggaccagatagcgttggctaccgtatttccgaagaagcactagttttcggaggtaaaacgatgaccactaccgacatcgcggttcgtctaggtagggcagaaatcggtaaccctgaattagtcgcacatatcccaaccgattttgccgaaaaagcctataaaaaaattgctgaaatgaccgaagatgcgattgataaaatgaaaaccagttcggggagtgtaagtctagtacttgttggcggtggtagcgtgattattccagacgaaatctctggtgtcgcacaaattttccgcgacaaaaacggcccagtagccaacgcaatcggcgcatccatttcccaaatcagcggacaatacgaacaaatctacatctattctcaaatcgagcgggaagaagcgctccaagatgccgaacaaaaagcgagagaacaagcaactctagccggtgcagtgactgactcgattgaagtggtggaagtggaagaaatcccattagcgtatcatccgggtaatgcaaccagattgcgcgtgaaagttgtgggaaatttggtttaagggaagtaagaagtaaatagtagtgcattgctgacttcagactggaaacaaagtaagaaattactttgcttccagtctatttttgtataacgtaatcccatatgtataaaattatgtatattgacacaatttgtgttattttagacatggatttaaataaatcaattcttatactaattatctagaaaaacaacccaaacgctaactaaaaatattctagtagggtaaataaatgaataaaggaaccgaacaaaagcttgccgcgcgtcattcacttctaaatcaattgaaatattaccgtttgttccgtatttttcacatgacttttttggattgggtagtagtccgaaagatgttattatagataaagcatatgtgcctgaatagcgcgcaaaaaacaaggtgaagtttccaactcatgaatatctcactcgaaaggaatgcctgaattatttgaacagaatcaattcaaattggtggaagagctagagggaacagcagaagtggattttgaactggaaaagcaacacttattagcaagagccaatgaattaattcagcaatatccagagaaaaaagccctttttgaaggataccttaagagccaatggagcgaatacgatgacttagaggaatatcttattgctgttacctggattttacataaaaagtaaacattgaaaggaagtgttttaatgagagaatatttagattcaaaaagccaaaaaaaggtagcgcttcttgagaagattttttatgcggaaaatcatacaagtacacaagaggaactattaaatgatttgaacatcacgtatccaaccctcatttctacgattaaaacaattaattttgatattgaacgatttggatataaagcgttttcgattgttcactccgcgccaaatttgtcctataccttaaaaatatcggataattgtagtattcaactcattatcaacgcctatattagagagtcacccaaatttcaaattctcgaaactttattgctggcctccttccctaacttacaagtattggcaaacgaagtacatgtttcttattctgggataaagaaagaaataaaggaattgaatgaagagctaagggaacggaacttgtctatttctacaggaagtcaggtagaaataacgggggacgaattttcattaagaatattctataccttcctctttttagtcgcatatagtggggatcggtggcccttttcttttgttcaatatgatgaaatcaccgacatattagagagttgcccaaaagaaatttat

SEQ ID NO: 3832 - DNA, 5621 bp, Listeria monocytogenes 4b
  misc_feature (1)..(end): n can be any nucleotide: a,g,c or t/u
agtgaaaccactcacttttatgaacgcttcaggtgaatgcattcgtccgctaatggattactacaacataccaattgaagatgtcgtgattgtgtatgatgatctcgatttaccagttgggaagattagattacgccaaaaaggtagtgctggcggacataatggaatgaaatcaattattcaacacgttaaaacacaagagtttaatcgcattcgtgttggcgttagtcgtcctttaaaaggagaagttattcattatgtcttgggagattttcctaaagcagaacaacctgatattatcgcagcgattcaaaaaagcgctgacgccatcgaagactttgcacagacaccatttatagaagttatgaacaaatacaatcaaaaatagacgatgacgaggcgtggcaatcttttgccacgtatttcggtctttcttcggacgcgtgatttactcttgcgttgcatagaatgaattttctgacaaaaaggagctgttttcccttgaaaggattacaacaattaatatatgaacaaaaagatattcgagcggtcttaaatgcgctggatgaaaaagaaaaagcacaacttgtcacagggctcacaggttcttcacgtgcgttatttgcaagcgtggtagaaggtgcgtcaaagcgtccggttgtatttgttacgcacaatttataccatgcgcaaaaattatatgatgatttactttctttaatggatgtcgatcgactatttttatatccagcagatgaactgatttcttctgagttgagtatctctagcccggaacttcgcggtcaacgcgtggaagcgctcgacttcttactatccggaaaaccggggatagtcattgtgccagttgctggtctcagaaaaatgcttccaccagtatcgctttggaaacatttcaacatatccattgtagagggcgaagaaattgatccagatgtactacgccaaaaactagtgacaatgggctacacaatgagcggaatggtaaatacgccgggagaattcagtgttcgcggcgggattattgatatttatccaattacagaagaatttccaattagaatagaactttttgacaccgaagtagattctcttcgtttctttgatgtggaaacgcagcgctcgacaacccgcgtggaagaattccgcctactgcctgcaactgaaatcattttagatcaaagctattatccggatatcgtcaaacgcttagaaaagaaaatgacacatactttaaatgaattgaaagaaaacgaggataaacaagcgctcgttgaaaatttagaagaagatcttgaaatgcttcgttctggcgtgaaaccagacatgttctttaaatatatcggtctggcttatcctgacccagcctcgctttttgattattttccaaaaaacacggcaattttgcttgatgaatttgggcggattttagaaacggaagaaagcttggagcgggaagaagcggagtggcaaacagaaacattaagtcgaatggaaacggttcgcgacgtgcaagtaagtcattctttcaaaaagctattagaagcaaatcactcgccgaaaatatacttatcccttttccaaaaacaaatggcgagcatgcgcgtctcgaaaacaactaacatcgtctataaacaaatgcagcaatttcatggccaaatgaatgtgttgaaaaccgagctagaaagttggcataagaataattatgccgttgttattttagccccaaaccttgagcgcgccgaaaaaatgcaacaaactttaactgactacgatatggaaagtacgattttgaaaaaagaatcggatgtgccgaaatatggaatggttcagtttgtcatcggaacgttccagaatggttttgaacttccattagctaaagtagcgattataagtgaaaccgaactgttcaataaaaaaatcaaaaaagtgaagaagcgccaaaagctctcgaatgcagaacgaatccaaagttactctgaattaaaagtaggtgactacgtggttcatgtgaaccatggtatcgctcgttatgttggcatggaaacgctagatatcaacggtgtgcataaagattacttgctacttgtttaccaaggagaggataaactatttatccccgtcgatcaacttgatttagttcaaaaatatgttggtgcagaaggtaaatcaccaagattaaacaaacttggtggcgctgaatggaagcgagtgaagaagaaagtacaagcttccgtccaagatattgcagacgatttaatcaaactatatgccgaacgtgaagctgaaaaaggctatgcgtttagtgcgaatgataaaatgcagcgcgaatttgaagaggctttcccgtatcaagaaaccgaagaccaactgcgctcgatttcagaaatcaaaaaagatatggaacgaccgcgcccgatggaccgtctgttggttggagatgttggttacggaaagaccgaagtggccttacgagctgctttcaaagcaattatggatggcaagcaagtcgccttcttagttccgaccaccattttagcacaacaacattttgaaacaatgaaagaacggttccaaggtttcccaatagaaatcggacttttaagccgtttccgaacaaagaaacaacaaacagaaacattaaagggtatgaaaaacggcacagtcgacgttgttgttggtacccatcgtttattatcaaaagatgtggagtatcaagatttaggcttattaattgtcgatgaagaacaacgattcggcgtaactcataaagaaaaaatcaaacaaatgcgttccaaaatagacgtactaacacttactgcaacaccaattccaagaactttacacatgtccatgctcggcgttcgtgacctctctgttatcgaaactccgccagcgaaccgttttccagtgcaaacatatgtggcggagcagaataacgttttagttcgggaagcaattgaacgtgaactagcgcgcgacggacaagtttattatctatataatcgagtggaatccattacgcaaaaagcagatgaaatttctgcgatggttcctgatgctagggttgccactgcgcacggacagatgggtgaatcggaattagagtctgttattttaagtttccttgaaggggaattcgatgtacttgtaacgacgaccatcattgaaaccggcgtagacattccaaacgttaatacactctttgttcaagatgctgatcggatgggtctttcacaactttatcagttgcgcggacgagtagggcgttggaacagaatcgcctacgcttacttcatgtatcaaaaagataaaatattgcgtgaggaagcggagaaacgcttatcggctattaaagaattcactgaattaggttcaggtttcaaaatagcgatgcgtgacttatctattcgtggtgccggtaatatcctcggagcgcaacaacatggctttatcgattcagtcgggtttgatctctactcgcaaatgcttaaggaagcaattgaggcgaaaaagccaaaagaagaacaaaaacaaattgtccctgttgaaattgatatccaagcagacgcctatattccggaatattacattacagacggccgccagaaaatcgagatgtacaaacgcttccgcaatattgaaacgttaagcgaactcgaagatttacaaagcgatatgattgaccgttttggtgaatatccagaagaagtagaatatctattcacaatgacagaactcaaagtccatgcactcgaagttggcattgagtccgtcaaacaagaacaaaataaaattaccatgctattttcagaaagcggaacagcaggcattcgcggagatatcgtcatgcaaatcattggcgaatttggccgaatggtcggtgtgggtatggaaggtacacaactaaaaatcacgataaacgtccaaaataaacctttaaaagaatggttataccaagtcaaaagtttggctgaaaaacttcgcggagccatgaaagaaagagcatctgcagaaaattgataagttattaagaaggaaggaggtggcggagtgccagaacgttccatgaagcgactaatgaaaggagcggcttggctaaccgcggcctctcttatttctaaaatacttagcgcagtttaccgagtaccctttcaaaatatggtgggggatgtagggttttatattttccaacaagtatatccgatatacggaattgcaatgaccctcgcactcggtggattcccagttgttatttctaaaatgttagcggaggcagaaggcgatgtaagacgacaacaaataattatgcgcgcagtctcacggatgctccgaattgtaagtattgtgattttcgcctttttattcctatttgccaacccgattgctatcatgatgggagacccggcattatctgaattaattcgggtcatcagtttcgtgtttttacttatgccacagcttgcgtttatgcgtggctttttccaaggagaaggtgacatgattccgaccgcaatctcgcaaacagttgagcaaattgttcgagtagctattattttgataggtgctggccttgcacttcattttaattttgatttatatgatgcaggttcaatggcgatgagtggtgcctttttcggtggggtttccgggattttcattttgcgtcatttttataataaaaaggtaaggctcggggaagggattcaaccagcagtatttacaaataaagaagaaaaagtaggtattggccgcacgttcttgcgacaaagtgttgcaatttgtgtagttagctccatgctgattttattccaattagttgattctttccaagtatatcgtttaatgagtgactcagggattccggatttcatcgctaagtcgctaaaaggggtatacgaccgcggacagccaatcttgcaattaggtttagtcatctcaactggacttgcgctcgcgcttgtcccaatgattactgccgcaagagttcaaaatcaacaaaaagaactaaaacgctccgtcttattagcgattaagattacattaattttggcaggtgcagaaacaattggactcatagttattatgcgtccgctaaaccaaatgcttttccaaacaccagacggcacattcgttttacaattatttatgccagctgttttcctaagctcactaatcatcatgttaagcagtattttacaaggtttcgggaaaattactgtacctgcagttggcgttggaattggacttattgtaaaatgggtaacaggaggcattcttattccgagactggcaacagttggtgcatccgtttcaacatgtgttggcttacttgtgattctactcatttgttacgtatcactaaaacaaacaatccgcgtgcctttcgttgaaaaaacaatgttgttccggctaattgccgctttagcgttaatggctgtattcccgtgcctatttgaatggttagctccactcaatacaagactcggtagtgcgttccaagcaattgttagtgcgttagttggcggcgggattttccttgtttttcactaagatataaattactcggtccaaaagattntgttttccttccgtttggctcc

SEQ ID NO: 3833 - DNA, 8148 bp, Listeria monocytogenes 4b
  misc_feature (1)..(end): n can be any nucleotide: a,g,c or t/u
ggcataagtaggttcttcaactacaatttctgccatgcatttgtcattatccagttctacaacataaccgtctttttcatcctttataattgttaattttatattattttccttcagattttctttttttgaatctatcaattggattacactcaatcgaatgccgctatatgtatctttttgcataattacgttcctctcaaattttatgattcaagctaaagcttctaaagaacgagtcacttcttctctaatttgcttttcactgtagtaaacattaggtaatttcaaatcttattcactatcagagaatctagctgccatatcagacacattccctaaaattgtgtattcttccatagaagaaactcgtctaaaatacggaataacatttccataaaacagaaaaagagaagactttttcttccccagtctaagaccttgctaatctttgagcaaggtcttttagtttatactattttttttaataatgccctaccacattcgtttagtctgggatgtttttttaactagcttagttaaactagcattggcataataataagaatcatacttataaaattgataaccactagtacgatattgtttcactctaacatataatgttttcgcccccattgatcgagcagcatcaataattgcaactattccaaagattggacctgtaattggcatgaatgatagaatccccaatgcaagacttctcatattgccttgtgtggttgtattatacttagttgtttgaacatatatccatttagaagctttcagtaaccgaggctgagtggcgatatttatgccatcttcaatgtctaaaggaggtgcttctagttcaagctcattatctacataaacgttaccttcttcatccctatgtacattttctattgtaccatcatcagatgtaattaccccgttttcttcgtcattcatttcaatttttacagtttcgcccgtcttcttatcttcaataactaaagtattacctgtttgggttgctataaaattttctccgtcatatgattcagtaggagtgttctctgtttctgatgcataagttgccagtggcagaaccgaaagagacattaacataactgatgctagtactataatgattttttcatggttatctcgctcccttattatgtttttttagacagatacttattatacaaaaaccaattgaataatgtacctaacaacaaaagtatccctgcaacccatataaagctttgattcatatagacatatgaaacatatagaccaacaataactagaataagaatcccgaaaaacacaccaataataatttttttcattttatccatctcctttacctaaaagcgcgacatcccacgctacaatacttttgtttttttcttaaagtacttcaactatatatgtatccgcttacattagtaatgttacaatgatgttactaatatgtcaagttgatataatcacaagtgggctcctgaaagatttctttattaaatcatttgcccatcaatttaaatttaattcttcataatttgcttccaatccgccacattactcaaagcaatcattgattcttcgttatcagtattgattttaagcaattttttatttaatttccactttagtataactatactattaaatcattgacacctaaatttacaaaattaaattctttatactagctatttcccattgtctatttagggtataccctttttttacatgaatcggctgtaccaaaatataaaagcaaaaaagagaagatgaaattatcatcctctctcccatactacctatcacttgattcttgaaaccatccctatcaaggactttccaacagattgattgcttcatttaaaaacaaaatctcttcttctaatttgtttttttgctgttttaattctcttatctgcagaaaagtcttcacctctttggtttccagtttatcggcatcatgtaacttcatccatttgtgaaattcgtaacgagggataccatactccttgcagatagactgtatggtagaccccctagagtataaaaccagtaggcttttttgaatttcttctccatattcgattcgagccatacctgtcacttcctatctaacacagaaatttttatatcctttttacttactacattatgatgatgtcacagggggttattccttcttcttcctttttctttgcattatcaaccaaataaggacgagcactaagcccaacaaggtatagttagttactgtatcacctgctttaggtaatatgggttgtttgttatccttatctgaagaggctgccagttcttttttagggatttcctgtatgttttcttcactgacatccaaatcatcctctgaaatgaacacctcaaccactgtttgactagcttgaactcgttcaggcgataagaggaacatcccacaaaagctgattagtaccattgccagaactaatttccttttcaagaaatgcacaactcctttcgtaatttcttatttaaaagcagctgtaaaagttaacgttgtttgatatgctccagcttttttgtctccttgagggtttccaatttgaattttacttacttctgtttcctccatcgcataacctgaaaagcttccaatgacgggattagccatgggtactacactattattactcttaaaactactagttattacgtccgaaatagcgccaacccgttgtaattcaatctctccatcggctgataatccactagataatgtcacctctacttcttttcctggttctaagttccgcattcattgttttcacagacatttctgtggcgttatcattagatcaatttactttttcgggtacaacgagggtataatccccttcaacagaatattccactactgtatttccttctttatctgcagcgtaggctgtccctccgctaaaaaacaccatacccattgctgctacacttaacgtacttaatactaatttattcataaaaaatttcctcctttgtctagacgacaactaattttaaatttatttcagacccgtttaaaggtgactgatcgtttaaagaaaaacattcatattttaatactgcattttcatattcgcctaccgctaacgttttttctaattcaatggaatacataccttttcccggttcgattaaatcagatatccatagaaccgaaccatccggatgaataagcgatattttgaagtaacaatcattaatttccggattatggaaattgactgcttgtgttgtttcatttgcatacaacgtcactttttcaaaccctggaatggcgattgtattttcttctccacttgtatccttctgttttttcccgttccactcaacggcagaatggtctacatccaacagatttattttatccttgaatagaaaataactactgattccaatgacacttactagcaatagtagtaaggatatgatcactactcttttcttcttcataggtaacctccaatttattcataaccaaatgaccttgacatgatcactagtctggctaatttacatcattcatacttaatcgaaaatacgacgttccccgtatattttccagcctggatgttttctggggattttatttccataactgcatcgccttctgttatttccgaacctggggcaagggttaaaatcgctttttccggattagtttcggacccgtcccaactcattggtgccaagcatcggactgttgtgtctgccgtattggacaaggttagcttgttgctctcagaaatggttgtttcctcataattcaaacctacggataaagttttactccctcgattaatcccttgtactttcaattcggaagcttcatttaaggaaatagacgctggaataatcaccgtgtagttttctacccatttggcgtaaatagttgtagatacagcagcaggcaaggaaaaatcaaacttattagtgaaattttgatcaagataccacccgtcaaagtaatgtccttcttttactggaatcacttcttcccagtactccccagaaattttattttgtactttttgttcttccgcatcttcaaattctccacccatcgcatccattgttagagaaaggaaagcgccttttctatagccaataggttcactttgttgcctgtgatatgtctgtagttgcgagagattcgaaaactgcacccaattcttttcatcataccagcttgtattttctaagttattaaaagtacttaaattgtgactgacaaacaagtaggttagggaggtggttccagcaaacatacctgtcataattgctgcatccgtaaaattatccagatataaagattttaacgctggacaaagttgaaacatgtaagacatattagtcactgaacttgtatcaaaattacttagatctaattcttcaaggatactacatttttcaaacatgaactgcatatgtgcaactgaactcgtatcaaagttgcttacatccaatttctcaagtgatctacaacccgaaaacatggaatacatattagtagctgaactggtatcaaagttgcttagatctaactcttcaaggctagtacaattttgaaacatggcatacatattagttacagcactcgtatcaaggccactcaaatcaagctcactaagattacgacataaggaaaacatatattgcgtagcagtgagtaaagatggtgctttcggataatcattatccctaataataactttttcaattcctgaattataaaatgccatttcaaaagacgtcactccagacaaattacactgttcaattctcacactttcaagtactgggaaatcagtacctctaaaatacgatgcaaaacttcctgtcagcgtagcttcttcaatctctatatgtttaatgcttttcaaataactattccaagcggttggtctactgcttggcacgttaccaaacatacgcaagttatattcattgttcacagtattacgataaatcgtccaaaaatcacctgagcttaccactgttaaatccggatcatccgaatcggcaacagacttctcaagaacatctggattttgcatcaattcatccgtagttgggatttcttctagttgctccacctctgctggtttctcttgcgcaacttcttctgcaatgatattagaggtatccagagaacctagctcctcttctggaagcttattcgttgtgtccctttcttgtgcgatagaaacattagcgctcccaaaagcaataaaaagcacagaaataataaggaccactcgcatggaaaactttttcatcagctcccctccttctttcgtagttaatttctagatgcaaactttctagctgcaacttaattatagaggagtcgaaaagcttttccggccataaaattttaacttcttaaaattctatggcttgcttagcaaagttattcataattaatcgaaaatactaagttccccgtatattttccagcctggatattttctggggattctatttccatgactgcctcgccttctgttatttccgaacctggggcaagggttaaaatggcattttttggattagtttcggaaccgtcccaactcagtggtgccaaacattggactgttgtgtctgccgtattggccaaggttagcttgttgctctcagaaatggttgtttcctcataattcaaacctacggataaagttttacttccacgattaatcccttctaccttcaattcagtagcttcatttaaggaaatagacgctggaataaccaccgtataattttctacccatttggcgtagagggttgctgaaacagttgctggcaatgagaagtcaaacttgttagtgaaattttgatcaagataccacccgtcaaagtaatgtccttcttttactggaatcacttcttcccagtactccccagaaattttattttgtactttttgttcttccgcatcttcaaattctccacccatcgcatccattgttaaggaaaggaaggcaccttttctgtagcctgtaggttcactttgtttccggtgatatgtctgtagttgcgagagattagaaaactgtacccaattcttttcgtcataccagtttgtattttctaacccattaaaattgcttacattgtgactgacaaacaagtaagataaagaggttgttccagtaaacatatctgtcgagcttgctgcatgtgtaaaattatctagaaataaagattttaacgctgtacaatttttaaacatggtacccatgttagtcactgaactggtatcaaaggtacttaaatcaagcttctccagtttttcattatcagaaaacatggcagccatattagttactgaactcgtatcaaaattacttacatctaacgcttcaagactagtacaaccagcaaacatggcacgcatatcagttactaagctcgtattaaaattacttacatccaacttctcaagggcgctacaatttctaaacatttgaaccattgcagtagcggaactggtatcgaaattacttacatctagtttcttcagtttttcacagccattaaacactctatacatatcagttactgaactcgtatcaaaattacttacatccagctcttcaagactagtacaatcttcaaacatggcatacatattagttactgaaccggtatcaaggttgcttacatccagcacctcaaggtttctattatcataaaacatgtaagacatattagttactgaactcgtatcaaaatgacttacatccagttcctcaagtgccctacagctgttaaacatatcccacatagtagttaccgcactagtatcaagaccactcaaatcaacctccataaggttggaacaatttttaaacataccttccgtagtgagtaaagatggtgctgtcggataattattatctctaatgataactttttcaattcctgaaccataaaatgcgagtgcaaaagacgtcactctagatagattcgaacgttcaattctcacactctcaagtactgtgaaaacattatttctaaaatacgatgagaaatttcctgtcaaagtagcttcttcaatctctatatgtttaattctgttcaaataactattccaagcggttggtttactacttggcacgttaccaaacatatgcaagctatattcaccgttcacagtattacgataaattgtccaaaaatcacctgagtttactactgttaaatccgaatcatccgaatcggcaataggctgctcaagaacatctggattttgcaccaaatcatccgtagttggggcttgttctagattctcgacctctgccggtttgtcttgcgcgacttcttctgtaatgagattagaggtataaagagaacccagctcaacctctggaagtttatttattatatccctttcttgtgcgatagaaacattagcgctcccacaagcaatgaaaataatggtaacgattaggatgactcgtatggaaagcttcttcatcagctcccctccttcttccgtaattagtttctagttgctaaacattctagctgttattttattatagaggagtaagggggtacctcgagccataaaattttaacttcttaaaattttatggcttgcttagcaaagttattcataattaatcgaaaatactagattccctgtatattttccagcctggatattttctggcgcttcaatagccatgactgcatcgccttctgttatttccgaacctggagctagggttaaaatcgctttttctggattgttttcggaaccgtcccaactcagcggtgccgaacattggactgtcgtgtctgccgtattagctaaagttagctcgttgctctcagaaacagacgttgctaatcggtttaatcccacggacaaagctttactccctcgattaatcccttctaccttcaattcagtagcttcatttaaggaaatagaagctggaataatcaccgtgtagttttctacccatttggcgtagatagttgtagatacagcagcaggcaatgaaaaatcaaacttattagtgaagttttgatcaagataccacccgtcaaagtaataatcttcttttacaggaactatctcttccc

SEQ ID NO: 3834 - DNA, 5028 bp, Listeria monocytogenes 4b
  misc_feature (1)..(end): n can be any nucleotide: a,g,c or t/u
caggtaaaagtgctggcttatccggtgccatctctggtggagctgagcaattattcggtaagcaaaaagcaagaggactagaacttattctacatcgtacaaccatcgttctatccgttgttttcttcgcaatactaattgcactggcatattttgtacagtaacgagatgttaaccacctgaatgaaaatttaggtggttttttattggagttctaaagaagcgtattccgcttccctagaactccaatacaaggcgtaacgaagtggagcgttgtttccataaaaaaaagtggacgaacaactcaaaaaggggagcacaaattattaaatacagccaatcccctagaactccaatacaaggcgtaacgaagtggagcgttgtttccataaaaaaaagtggacgaacaactcaaaaaggggagcacaaattattaaatacagccaatcccctagaactccaatacaaggcgtaacaaagtggagcgttgtttccataaaaaaagtggacgaacaactcaaaaagggaagtataaattattaaatacagccaatcccctagaactccaacaaaaataacatccaacccagatcaaccaaacctccaaaaagaaccaaggagcgatatttactatgaaaataacaccaccacaaccattcctattcgaaaaaggcaaaagagcagtgttactcttacacggtttcacaggtagctcagcggatgtaagaatattaggtaggtttttacaagaaaacgattatacttgctatgcgcctcaatacagaggccacggtgtatctcctgacctactgttaaaaacgggaccaaacgattggtgggaagatgttcttgaagcctatgatcacctaaaatcactcggttacacggaaatcgctgtagcgggactttcgctaggtggacttttttcactaaaattaggtttttctaggccgttaaagggaattatagccatgagtactccaacaagaatggacagttcatcaccaataattcaaggctttttagattatgtgcgtaattataaaaaattagaaggtaaaacacctgaacaaatcgatgctgaaatggttgcctataaagacgccccaatgaacacaatcgctaaactaaaggacgagataaatggcgtcgtggctgaaatagatatgatttatgcgccaataatggtcgtccaaggtgaaaaagacgatatggttgatgtgagcggagcacagctaatttatgatacagtagagtcaacgaagaaagaattgcactggtttaaagaatctgggcacgtcatcacattagacaaagaacgaaaagaagtaaatcaagccattttaacatttttagatagtttagattggcaagaatagacaatttttaaaacagagagaggagggacagaagtggaacaaaaacaaatggaagaaaaaattatgaatctattaacttcagcgcctgataaaacatttgcgcttgaagatttggaaatagaaatagctttaaacaatgcggatgactttaaattaatggtgaaagctttagtgaaactggaagattccggaactattgtccgctcaaggaagaatcggtatgcattaccagaaaaaatggacttagtaaaaggaacatttcgtgcacatgaacgaggttttggctttgttctcccagaagagaaagaaatggacgatatttttatcccgccaaatgaagttaaagatgcaatgaacggtgatttagtttttgcaacaatcacgaaacgtaaaggcgataatttggcagaaggtacgattaagaaaattgtcgaacggaagacaacacaaatcgtcggaacttatatggaagacttagctggtactccaattgtgatgccagatgacaagcgactttttggtgaagtggaaattgatttagaagacggcttaaaaccagttgatgggcataaagttattgttgaattgacggaatatgcaactgggcatgcgcgtgcaagaggggttgttaaatcaatcatcggtcaccgtaatgatccaggagtggatattttatcgattattcataaacacggtatttcaatcgggttcccggaagaagtaatggagcaggtaagtaaagcgccggatgtggtggatgattcggatattggtaaccgtcgtgatcttcgtgaccaaatgattattacaattgacggggcagacgctaaggatttagatgatgctgttactgttaagcaactaccgaatggcaactggaagctaggcgttcatattgcggatgtaacgcattatgtgacagaaggctcgccgcttgatgtcgaagcgcaagaacgtggaacgagtgtttatttggttgaccgcgtaattccgatgttgccacataaactatcgaacggaatttgctcgcttaacccacaagtagatcgttttactatgagttgtgaaatggaaatcgatgaagaaggtcatgtggttaatcacgaaatttttgaaagtattattaaaacaacagaacgtatgacgtatacggatgtaaatgatattttagttgaaaaggacgaagctttacgggaaaaatatgcgccaattgttccaatgcttgaaaagatgcaagatttggccgaaatacttcgtcgtaaacgtgaaaaacgtggcgcgattgattttgactttaaagaagcacgtgtagttgttgatgaagacggtcatccagaagcagtcgttatgcgcgaacgttcagcgggagagcatttgattgaagaatttatgcttgctgccaatgaaacagttgcagagcatttccactggatggatgtaccatttatttaccgtatccatgaagatccaaaagaagataaattagcgcggttctttgaatttattacgaactttggtttgattgtgaaggggactgctaacgatattcacccagctgctttacaacaagtactagaagaagtaaaaggtaaaccagaagagatggttgtttcgactgttatgctgcgttcgatgcaacaagcgaagtatgacacagtaagcgccggacactttggtttgtctactgatttttatacacatttcacgtcaccaattcgtcggtacccggacttgattgttcacaggttgattagagagtatttaattaacggggatgttcgtccggaaacgttagaaaaacgcgctgaggagcttcctgagattgctgaacacagctcgaaaatggagcgccgtgccgttgaagcagagcgcgaaacagatgaactgaagaaaacggaatttatggtcgacaaagtgggcgaacgtttcatcggaatcattagttcggtaaccaattttggcttatttatcgaacttccaactacgattgaaggtttagttcatgtgagcgcaatgaaaggcgattacttcaaattccaccaaaatcaattagcgatgattggcgaaagaacaggccaaatttatcgtattggtgatgaagtggaagtcgaagtaaccaaagtagacgtggatgctcgtgaaatcgattttgcgcttcgtagtgaaggtaaaccaggtccagtgagcgataaacaaaaacgccaacgcgaaaaaccgattgataaaacaagaaatttcaagagtaaccagaaaaaaggtcgtaacaaacgtagagctggtaaatcagaagacgtgaaaccaaaatcagaacgtaaagaagacgaatggcatacaaaacctaaaaagaaaaagaagaaaaaacctttttatcaaggtgtagcaaaagaaagcccgaagaagaaaaaacgtcgctagaaaggatggggagttatgccaaaaggtgatggtaagctagttgcgcaaaataaaaaagcgcgccacgattacgcaattgaagaaacttttgaggctggcattgtcctgcaaggtactgaaattaaatccgtaagaaacgcacgggtaaacttaaaagattcctatgcacgtatcgacaaaggggaaattttcttacacaatatgcatattagtccttatgaacaagggaaccgctacaatcatgatccactaagaacgcgcaaattgcttttacataagaagcaaatcagccgtttaattggagaaacgaaagagtccggttattcgattgttccgctaaaaatgtatattaaagatggctacgcaaaagtactcatcggtgtagctcgaggtaaaaagaaatacgataaacgccaagacttaaaacaaaaagaagcaaaacgtgatatcgaacgcgcttttaaagagcgccaacaataaaagcctaaatctagtcattcaaccaaaagttggagaagctagatttaggctttttttatatgtcgattttggtgaattcgtttaaagagagattttgaagttcatcgtgaagaaaataatctatttcatttttgataccatttagaatacgctcttcttcaagcactttagccactctaagtgctcgttgcataaagtgtttacctttttgcttttggccgagcttatacagcacaattccttttttcgcaatagccatacagaattgtaagtagtaatggttatgcttagcgatttttatagataattcaatgtagtgcaaagctagttcatattcttcgtctaaaattaaataagtagcacgattaacatgaagtgaaatctcaatcgaaagggttggatataggtaacgatattttttaagttgagagataaggcgatttacaatatgttgagcggtttcattttcaaaaataaagaaaatatttcttaaaattaatatgtcattccaaaataattcatccgcttccgaaagtctgtcccaaatgtaggttactttttctcgagcaagttcaaaattatgttctttttcagctagtaaaataccttcaagtgaggctttaatatcagaaataaaaatatcagtgtggttttctaagtaatcatcgcatttggaaataacattaagtatcatatctgtttcggaggaggtaataatcttggagtatagataaaggatattatcttttggaga

SEQ ID NO: 3835 - DNA, 4822 bp, Listeria monocytogenes 4b
  misc_feature (1)..(end): n can be any nucleotide: a,g,c or t/u
taaaaagcttcattcgaaaggcgttttttcacatcttgatgaatcgctaaaatttgttcggatatcgaagtttgttcggttattcctataattatttcattttctggcgtaagtagcataaatggaaagtccttccgatattgttcagaaagatttttccattcagtcagattgatttcttttgttggttgaatttggatgagaacggcattttcctttgaatttaatatcatatcgtataatgctagtcgctcttcccattcttctttgttaattcgtaaatttagccaacgccaaatcgtattgtcccgtaaaatgtaatacgcttcttcccttggtatcacactgtctgtcaattgttttttctctatttgtataaatgtttcttttaattcttgttcatttaaaggttttagtaaataattttcaattcccgctgaaagcccgcgtttcacataatgaaaatcttcaaatccggagagaacaatagttttagtcgttggttgccgcttttttcattcgtcgattaattctaaaccattcattacaggcatctctatatcggtcaaaaggacatctacgtcttgattagcaaataactctaaggctattgcgccatttttagccgttccaacaatttcaattgattgctcaaattctggaataatactttctaaacctttgagaataaggggctcgtcgtctactagtacaatttttagcattacttttctcctcccgtattttgaggtacttgaaacagaatgatggtaccttcatttgctttactcttgattgttaatcgataattttctccatataaaagctgcaatcgtttgtttaaattagctagaccgatgtggctcgtctcatctttactttcaattgttgcttgcacttcttttaatttctctgcatcgattcccgaaccattgtcttcaattctaaattgtaaattgtcattttctgcagtgaccgtaattacgactattggattttgattttctttaaaagcatatttgaaaaagttttcaataagcggctgcagagcaaaccgtggaatctgcgtatgattgaaacgtttttcaatattgatttccagcttaattggctgttcgtggcgcatttccataaagcggacatattgtttcacgtaattgatttcttcacctaaagtggtgatttcacggtgattagctgtgtagcgcagtagtgttgcaagttgataaatcatatcacttgtcgctttggctccttctacgcgtgcgttcatcctaattgcttctagtgaattataaagaaaatgaggttgcatttgaccttggagtgccttgagccgcgctttttgttcttccatttctaggctatagaccttcttcacataagcatcgaggttttctgtcatatggttaaaccgctcactaatcatcgtcagctcatccccgttattatcgaccggaagctttgcatcaagggtccccatttccacccggttcatcccgccaataatcgttaaaatccgcttagaataacgcctactaataacaaaattaatgctaatagaaaaaataactaataacagcccaataccaaataaagtaagttcgatgagcggcgcgctgtcatctgttactcgatataaaaacgtattgtttttcaagccacttgtttcatcttccgttttttgaaagtatacttttttgttgtcagcatgaagccatccttgtttttcaggcgtttggatttgtttctttgggtggttggaatataactcgactcccttcgtgttttgtatttgaaaaatcgagttttgataatctttcgtaatccatttgcttagaaaagtcggatcaatgtaaagaagcagataacccatttgttttaatgtgcttggatcattaatcggctgtttcacaactattttattttcgattgtataaaaagtcccttgctttgatgcttcggtggcgatatttgcctccccgtatgtatcaaccgtttctttccattcacggtaacggctcggaaatgtataagagtaactcccatcatccgaaatgagctgcagcgcgataatatcttcatcatacgaaaaataagactgtaaatacgtttgcatatctacagaatagaaatttttacttttaaaatagttatcgatattttgctctgtgtagctaccgtaatcatttgtcatcgcgatttgaacatcctgcatcaaatcgctattacggtaaatatcttgcgttaaactaattaatgccttttgcttctccgtaagtgcatcgagctgtttattcgcaatggtttccgctctttggagattggtatctagctgaatattagtatagtacttataaatgaaaaaaagtaacaagctcaccgtaaaaagacttgttaaagaaaaaattaacaacatccttttgaaaacgcgcttgcgtggtaattcttgtgtcatgctcattcactgccccctcttcttttctgattattgcatactatcaccaataatgtaaggggttacttaggctccatttgcttgaagcggtgtaaattgattttcattatccaataacttggtaaaacaccagaaataaacaaaataaaagcaggcattttcgaaattaaccatgcgcaaaaaacaagaccaaccacaatcataaaagtatttttaaagctagtaatcgcgagcaagaacgcttgcccgacataagcgcgcacatttttcatttggaagtggacaaacactgtgaaatactgcaaaaacgcaattcccacgagaaaaagcaagaacattaagaagaagtataaaatcgtcgaccaaaaaccttgcattaattcaaaaacaatccgcaaatccgcatacaggaaaatccctatcagcgcaaaaactgcacccgctaaattagccgaaacaaacacctgtttataagtttgccaagcagatttccaaactggtacatctaaatcgccccgcgcccattttctcgttatcgtaaataaagcaaccgttgccggcataaagccaagcacaatcccgccgatcaatacgaggaaaagccatactaaatttgtccagacgagccggataatccagtcgctaataactgaaaatttatcaataagtttcattctttttctctcctttgatagtaagagaaagcctgagttttcgcccagacttttctttttttatttacttaatgggctgccttttacgtacacaccgcacatgcttaaaacaaattcactaaacatcgcattcgaccaagcaaaccagtcgcgcgtgaattcagccggattcgaggcgttgacaccttcgtgcatataatccgttccgccatctccggcaatcagcatctctaaaacggcttgtttttccgcttctgtttctgccgttaatccttcgatgctgagtgcaatcggccagacataatgatcaggtgtatgtggactaccaattcctgtaagtacactaccttcgacaaaataaggattttctcggcttaaaattagttttctagtcgcttggtatgcaggatcagttttttcgcaaaaaccaaggtatggtgcagcgagcaagcttggcacattagcatcatccataaataatttacgccctgttccatcaacttcatacgcgtaaacatcaccgtaatacggatgcgcttgtttcgcataggtttcaatccctgcagcaacttcttttcgtaaatctgcgctatctttcagcaattctttatcatccgggtaaaacgccgctgcgatttcttggacgtaatccatcactacaactaaaaacatattactcggtacaaggtagccatacatacatgcgtcatcacttggtctaaagccactccaagacataccagtatagcttacatccgttccttttccgttattatttaaggtatctgattgacgcacattttctcgttcaaaacgatacggactttgctctgtatgtttttgttcgattttaaaaacttcgatgatttgatgcaatgcttttctaaattcttcggtaaaatgaccagtacggttggcacttttccataataggtacgctaattgaatcggatagcaaagtgaatcaatttcatattttcgttcccaaaccaggtcggtcattgctgttttgtcgttttgaaatcccgcaccattcgctgatttattaaaagcattcgcgtatgggtcatgcaaaatacagttagtttgtaactttacgaggttttcaataacagtcgccatttcttcgtcttcttccgccacaattaaatatggtctaatttggcttgtagaatcgcgtaaccacatcgctggaatgtctcctgtaataacaaatggaagcccctcttctgtttcttgtaaagtagttgtatacgtattcgtaaaacatttttcaaacatgcggtgaagtttttcgttttctggaaaagtcattttcactttctctatccatttgttaaagcttgctggtactttgtttgtcatctattacactccttttaaagtgatgatttcgtttggactagcggtaaattgtttcttggcatctcccgtcgtttcttccaaaatagtcgatttctgccacggttgcatcgtctgtagctgttttggttcacttgcggtttggaagaatcggataatcggttggttgtctttagcgagtttaaatgctgagaagacaaatccatcctctgttttccattctgcaaaatctcttttttctgcgagaattttttctttcgttgctgatttgtgttggaatgcaaaaataggagtcaagcatgcgtttacttgtgctgggatggtgcta

SEQ ID NO: 3836 - DNA, 6323 bp, Listeria monocytogenes 4b
  misc_feature (1)..(end): n can be any nucleotide: a,g,c or t/u
gacttagcctataaaaaagttttacaaaaaattaattgaaatatttcttaatttagcacagacaaaaattcgaattcatagtacacttataagtaaccatgatagggatttatcgccagtcccttattagccaccagcaaaatttgctaggtggttttttgatgaagtttttcttttcgaatgtggatggttgtgataccctaaaaaaggtgagttttaatgaagggaaagtgtaggaaatgacaaaatggttaccaaaggatttatggattgtaattattgggatggtgttactatatacagggctatcgtttatttggcctttcaatatgatttacatgacgcaagagttagggatgtcgacaacggacgcttcattagtgttgttgataaattctggagtggggattgtttctagtattatcggcggacttatttttgaccggttttctggttttatttcacttacgattggaacgattatattagtgctttcaactgcttcgttgtgcttttttcacggatttccattctttatttggaatttgtgggcggttggtatcgcgatggggatggtcttctctggattatacgcagcagcagggttaacacatccgactggaggaagaactggatttaatgcgatttatgtggcgcaaaatattggcgtggctattggtccgttgcttgcagggcttctagcgaaacaaggaatgagtcatgtatacattggttcttttgtatttgcgattgctttcgctggatatttcttcttctttttccacaagattgattggaaatcggagcgagtaagcgcagaaacaaaacatcgcaaaaaaggcgctaaacgcgaatttccgactaaactagctttgtgttcttttattctattattattgacatacttgctttgccaattgccgcatgtgcagtggcagtcgaatttatctacgtacatgacagaaatcaaaggtgtgacatcgagcgaatacggaaatttatggagtttaaatggcgcgctgattgtacttggtcagctcattttaatccccgttgtaaacagatttaaaaaatatttactcgcacaaatttatatcggtattttcttatttatcttatcttttgtagtcgcaatgaatgcaagtgtttatagtggctttgtactcggaatgattttcttaacgctcggggaaatgtttgcttggccagcgattccaacgattgcttatcaacttgcaccaaaaggagcggctggcttgtatcaaggtcttgtgaacgggatggcaacagcagcgcgcatgctagcaccatttttaggagcaattgtcgttcaaaatctcggaggcattaaagctctatttattggcgcatttattttactcggatgcgcattaattagtattacactacaacaaattttacagaaaaaggaccaacaagataaagcagctttgaaaatttccgtcaatcagggggaataaaaaatgaaattatggaaaaatgctaccttttaccaaatgacagctgaaggggatcaagtttctgcggtattaacagaaaacggtcatatttatgcggttggagaagcacgagaactagaaaaacaatatgcggctaatattaccgaaacgattgatttagaagagaaagtggtatttcctgggttcgttgatgcgcatattcacttactttggtatggacaagctttagaacgtcttaatttaaaccaaaccactactaaaaaagaggcactagccctgattgctgaaagaacaaagcaacttgctagtgatgaatggttgtttgtggaaggttatgatgaaaataaatggtcagatgagcaaacgttgatttctttggccgatttagatgaagtaagccagacaaatccgattttagttcggcgcattgattatcatagtgtttctattaattctgcattacaagcgcatattgccgatttttcggaaaatggttttgatggtggcggcgaaattgttcgtgataaagagggaaattttacgggaattttaagagataatgcaacgactatggcgatagattctttccctgcagcaacgccttctgaactaagcgcatggcttaaaatcgcgataactgatctgtggtcgaaaggcataacgggtgcacactcggaagatttacattatttcacgggattcacttcgactttagctgcttttcgaaatactattggtgctaataaaatgccgtttcgtgcgcatttgctggttcaccacgcagaactagctgctttttcggcttctaatgaaagtttcgtaagtggggatgcctttttagaattaggggcgatgaaaattttctatgatggaacagttggctcgcgaacggcgttgatgagtgcgggatatgcggacaaccttgatgaaaaaggattgcaaattcattctgatcaagcgtttgaagatttggttaatgcggcgcgaaaagcaggattacctgttgctattcatattttaggggatcaagcctttgctaatgttattcgaacgttacgtgccaatccgcctagagaagggcaatacgacagactaatccacacaccttggcttacagaagcgctaatagaagaagcggccgggttacctgtgctatttgatatacagccacaattcatggcgagtgatcttccttgggcactagaagtacttggagaaaatcatccaccgctagcttttgcttggaaaacgcttctacaggctggtttcccactagctggaggaagcgatgcgccgattgaagtgccgaatccgttttggggtatccatgcggctgttactagaacggcgaatgcagatttggatggagtagaatattggccagagcaggcactcactgtatttgaagcgattcaactatatacaaaaggcgcggcatttgcgggctacaaaacaactacacgcggacaaattgcaccaggttttgttgctgattttacgattttggcagaagatccatttcaaatgaaacaagcagaccttcgtcaagtgagcgttatgatgacagttgtagacgaacaaattgtctatcagaagaagtaaaaatagctaggaaactccatacagagacggatgtttctgaaaagtttttttgctaatatgggaacggaagaaatgccacgcttctgactcagtggcacggatacgggaacgagggatgtattaatggaaatatttgaactgattttattaatgttgagcgcggtgtttttgtctaatgtattaagccgatttttgccggggattgcagtgcctttaattcaagtaatactagggattattttggcgattccgcttggggatcatacgatggatttaaatccggaattatttttattattatttatggcgccgattctttttaatgatggggcgagtacggataagaaatctttatggaaaaatcggaaggctattttgtcattatcgattgggctagtgtttgtaacagttggggtactgggtgcgtttattcactacttaattcctgcgataccttttgccgcggcgtttgcgttagctgcggcacttgcgcctacggatgctgttgcggtgggggcgctggctgaaaaagtaagagtaccccataaaattatgcatattttggaaggtgaatcgcttattaacgatgcttccggacttgtttcgttccagtttgctgtgttggcgcttgtaaccggaacattctcatttatgtcagctggaacaagctttttgcttctttcattaggtgggattgcgcttggagctgcccttagtttactgaaaatcatgttaatgcgtggtttacgtcagctaggaatcgaaaatatgacttcttttatgctgatggaaattttgttaccatttttaatttttatggtagccgaaaaagttggagtaaatgggattttagcagtagttagtggcggaatggtgcattcatttagttacaagggactaaatcctgaaattgcgcaattgaacttgctttcaaaaaacacgtggtctgttattatttttagtttgaatggtttggtatttatcttactagggacacaattaccgcaaattttgatgacgatttggcaagatgctaatattcaaaaaggtatgctattcgtgtatatactaggaatcactttcttactgctcgggctaaggtttttatggatcttgtttttccgcaattacgaggaaaatccgaaagtggacttggttagcagattgaaaaatacttttctttatactgtggctggtgttcgcgggacaattacattagtcagtgcgctttcgttaccttttgttcttggtaatgggaatgcgtttcctgagcgtgatttacttatttttattgctgctggagttattattacgacgctacttttggccaatttcaccttgccactttttgcagataagaaagacaaaattgcggcggatcatacgacagatattgtactacttcgcgatattgtgcagcaattacaggcgtataaaacagatgaaaatgcagtggaaatgaataaagtgttgaatatgtataataatcggattttctctttgatggagcataaggaagtaaatgctactgaaaaagaattgcggcgtttaacacaagaatggcaacttgaaaatacgaggagattagtatttgaacgaaaaattgatactggtgtgggactgtcgcatatgatgcggcttggaaaacgactctacgtccaaacacgagcagagaagtaccgagcgagaatgcggtatcgtcagttattaagtcatcgttttcgagacttccgatttgtgcctcttacttttgaagaacgtagaaaagaaattgctaaactgcaaaatgaaaacaatttattcgtcattcaaaagctacaagaactggattcaaatgagtataacccagaaatcatttcgctttatttaatgaattttgagcgagcattgggtcgtgggaaaaataaaaaagaaagcaatgatgaagcgctacaaacaacaattgacttagcttcacaaattgagcgcgaaacaattcaacactactttgaaaaaggtacgattacgcggaaagaaatgaaagtgtatcgtgataatttacttgcgatagaggcgaatatgcaattagaattttaataaaaaagacagttaagctaattttttagcctagctgtctttttttatcatcaaaataataaataatccggtcgataagttctttcgtcgtgctgtcaaaatctttttctttttggttagttaaaagtccaattggcggtgagatgggtaaattttcaatcggaatgcggaccgtgccatcaagtagttctgagtgcgcggtgctagtaaagatagatacaccaacattttcacgaacaaaatacttatgtgacatactacttgtgagctccatttttttgtaatcactaccaatagcacgttttaaatgctgttcgatttggatgcggatggggcaatttgccggtgtgaagataaagcattcatcgcgtaaatcacgtaactccacagaagtacgtgaagctaacggatggctttctgagacgattaaatctaacgaatcatggaaaaatggaaaatagaagttctccaaaattagctctggttctccgcaaatcgcaaaatcaatttccccatcaatgagtttttggctacaagtattcgcatcatccaccgatacattcaccattaactttggaaaatccgctagaaacgtttttaaaattttcggaaaaacgagactagcgctaggctcggaaattccaactttgataaggccggcgttgccattttttaagtcgaatatcgtgtgatcgagtacttcatattgagcgatgagctggcccgccctttcgtaaaataatctacctgcgtgcgttagttttaaagttttgccacgttcgaataactgaacatctaagtcttgttccaattgtttaattcgcatcgaaatagtcggttgcgaataatttaatactaaataatgcgcgttgaaaacttcccgtattaacccccctataaaaaaaattaatggttaaaaattccaatataattcccccttcatattggagttttttgatatttctaacagtatacactgtaaaaataggagaagcaatttattaatcagataaaattcataggaataatncggattggggcanacgctttagcattcctgtggaggccattagtttctttccagcacacgggggncggttnctcctgnagagaggaggagtgacgaatgagattcaaagccaagactacntcctcctcnggccc

SEQ ID NO: 3837 - DNA, 5394 bp, Listeria monocytogenes 4b
  misc_feature (1)..(end): n can be any nucleotide: a,g,c or t/u
tcccatttagcgccctttttagcagtcttccctacccatttggcaccttttttaccatattttgcaataggctttctaaacttataaataaacttaccggcagccatagcagctgggataagccatgcccaatttccatcagggtcaaccatcatcaccggattattattcgcataattatacccattcatcgtctgcgggtcgtcttcatcgcccgggtctggatcatatgcggtaaacacgccttgctctggttcgtaataacgcgccatcaagtaatattgttcgatttccttgtcatatgtgtatcctgcataaccatacggattggctttggcttcttctgtagaggcagtgtttttcagcacatttccccaagcatcatacgcatattctgcgacaatcttacctgcttcatctgtgagcgcaattacgtcgccatgcgcattatagtgataatagagggttttgccgttcatcttcatcgctaaacgaacattatcatccgaataaacatactgacgaactacttttccatcaccatcagtctcatacagaacatcaatactatcgccatcataatgataattcgtcgtcacgccatcgactgttttcgacaagcggcggttatcatcatcgtacgtataactcgtaaacggcttgctctcgccttttttcgtaatgctgcttaaacggtcgccggtatcccatgtatacgtgtacttgccatcgcttgtacggttaccattggcgtcatacgtcagcgcttctccgttccacgaaaccagttgattaccatcattataacttgcggcaattgtttttgtctcgcttccgctgattgctacttgtgtgcggtttccgaagccatcgtaggtgtatgcttttacggtgccgtctggtagtgtttctttggttagttgattgactgcatcgtattcgtaggttgtttttccgtcttgtttgttgtcgatgcttgtacggttgcttgctgcatcataggtgtagttttcgtctaaaatttgggtgccgcttgcgctactaatagctgcgttggtgactttttgggtgctatcgtaggtgtagttggctgcggtgccgtttcctgctgtgtagacgttaatgtttccaaattcgtcaaactcgaaataggcgtttttgcttccgtcgtttacgcgggtattccggtctaagtcgttgtatgtgtagcttgtttttgctgtgtagtcgccgtggttaatggctacttctccgactttgtctgtttttcctttgttgtcttttgttggtttatctttgtaagtgtagcttacgtcaccacctcgttcggctactttggtgattcggttggcatcgtcgtaggttttgtcggtaacgatgctgttaatttcgtcggttacttttgtttggttgccgtttggatcgtattggaatttaaatgctagtttatcattccatttaatcccgtccaagcggtcagcggaatcgtatgtgctttcggttacgcgaccatttggcatgattgcttttgtttcattaccggctgcatcgtattcatacttgattgtgcgattaagtgcatcggtaaatgcggtaattttgttatctacgtcatattcatagatatttttttgcgttttgccagatgcggtgacatttttttcggtggtgttgccattgtcgtcgtacttataggctacggatgtgccgttcgctagttttgtgtctataagtgcgttgtctgcatcataggttaaagtttttttgttgcctttttcgtctgtttcggatgtagtgttaccgtaaatatcgtaagtgaagctgattttgcggccttcttcgtcatagctagctgttacataattgccggaagcgtcgtattcattttttgttaatacttcgccttctatgacacgtacatcgtcaaaccaagcttttccggttaaaccattgcggaacatggtgtaaactttaatcattttgactggcttagtcggtttaacaactacggcacttcggttccagtcgttcgttccgagtgggaattgaccttgtacggaagaagttgtgccatcttgataatatattgttccccatatcgaataatcgttcgacatcgttgcaacagaaccgtttgctttggcgtcttctgatttggatagtgcggaaattgttaatgctttggcttctttttgatttactggtacatcttggacaatatgcgtgtaggcttcacttgttgcttttcgctcgaagtaaacagcgctatcaccgctatggctttcattatcgactacttttgcttgtgtaagtgcggtatttcctgaacgtgcccagccagtcggaagcgttccattgtgctcttcaaaactgctgttgactaccgggttgtaactggaagcaacactacctttttcaaattgaacattgtcgtaccaaattgttccttttcctttatgcggagctggttgttcgttgtccaaataaagcaagacttggcgcgtgtttttagatgttttaaaggttaattgacgttttacccagccgccgttctttttgatggatgtcgcacggttggattgccatacgccagcatcggtaatatcttttgcattcgcatcttgtaaacgtccaatgagaattgcatcggcgtttgtcattccggatgttttaatccaggcgctaaatgtatacgttgtttctggttctacatcaacgcgttgagtaacggatgaatagccttttacggtagaatttgcttcactcgttagtttaacggaaccgctgccgccgagtgttcctggagctgactgagtgctatcgaatgtcatgcttccttttgcatcagattgaatcagtgtccagttggaaactcctgctcctttttcaaagccgctgttttgaagtaagttacctgctgaagaaagttcaccactacctcgaattggatttccataggcgtcatactgcgttacagaggatacttgggattctgtcgcaagtgtttctgacaccgcatctgctccgtcataagtaaccgtcgttttgcgtccttctgtgtcagttgcgctcgttacatcgttatttccattgtaggtatatgattctgtaccgtaagcatctgtcgcttgcgtgatattaccatctgcatcgtaagaatatgtttcttcttgtcccttaggattcacttcttttactaggttatttgattcatacgtgtaggtcgttgtgagtttgagaccatctgcatccacaatttctttctttggatttccagcatcattgtaggaataaatggttttcttctttttctcgtttgttaaagttgtttgttgctcttccatgtcataagaaagtgttgtttttttgccgaccggatcggttatttctgttaatttctcttcttcataagcaaaggttgtttcgtatggtttttcttctgtatgttttggatcgtaaatcgatgttaataagccatctgtgtagccatagcagtatattttaccgcgggcagtggatgaactgattagctcttgtttgtcattatacgtgtagctgattttacggtcttctggtccgacaagttcttttacgagctcgccttcatacgctaaagtcacggtacgtccggaagcgtcgcgcatgtttgttagtttgccgtcagtatattcgtaagttaattcgttgccttttgtatctttttcggattttaatcgtccatcagctaaaaagcgcgtttctgacttatcttcttctattttcaaatagccatctgcgtttttagtaatctcggagtaaatgcctggtggtgccacgtatttatcgccttttttagtgaaacgatggactttcttgtccgattccacccatacgatatttccgttttcttcttcaataagtttctcttcaagcgtacttgtccagcctttaccaaaaatgcctgttgcgtcatcttggctgttaaaagtacggtcgacattgatactcgggccgtggccttctaagttaaaatctgtttcatggaataaaaagtttccatttgtagcgtttacttcgccgccacgtaccggcacacttgtccagtaatctaccattcctagctgtttatttactacttctggaagggatggtgtcgctggttcggattgaatacttgtggcgttatttcccgctttttggtacgcaacaattcggaaccagtagtttgttcgttctttataattaccgccagaattggtataaactggagaaggatcttttgctagttcatcgccttttccgtcatgatgaagagcgaatttaccttctgcaatttcttctttggttggccaaatccctttattttgggtggtccactttgtttctgcgccaacatcgtattcttcgtaggctttcccattgaagacaagtactttatagccatccgccattgggctcttttcccagttaagttccacgtatcctgtttctttatgagctaagttagaatatgctttcgcagcagggggttgtggtttttcgattggcatataggcaaatactaagtcggaattcgggctttctccacccgggaaaacggcttgcactctgaataaatagcgcgttaaattgcgcagtccaaaagtacttccagcttgaaacgcattttcatattgcgctcgcggatcaagagcgaattcggttcctttgccatcatggtggaattcgaattctccattagcgatttcgtcatttgttgggaaaattttcttccctttagtgctccaagtggttgcggtgctttttgtattaatatattcgtagttatatccattagaaataacgatattataactcgttgcaccaggaacagccttccaagataaatccatgtaacctgttccagttcctactccatttgaattcgttttaacagtaggtttttccggttgagcatacgtataatttacttctagataaggatagtttttattattttcacttgctactaattttttccaatagttttgatcgatgttcgtagctagacggaaaccgttatttggtcgcacgccacttgcccatgcttgaactgttttagtgacatctaaattcgcccactcacctcggccgacattgacgcttccaatccgtgtcgttgcaggagctgtattccatgtcacttgccatggggaccagttcgcattagattcatagtaccaaagatcatttttaactgttggggacatatgccaaatgttatacacttttagcgttgctttacaaatcggggtttattgaagtgtacgtgggccttttgaataggcggcatgatgtgctgtggattgttcattaccagttacggagcttgcaatcaagtgtcaatgtcgtgtgcatgagtgttcctataccaga

SEQ ID NO: 3838 - DNA, 4981 bp, Listeria monocytogenes 4b
  misc_feature (1)..(end): n can be any nucleotide: a,g,c or t/u
gaaaaaggaaaccactgccgcaaaacaggggataacagcacacagatgaaaaagacgaccagtagattgagaataactcgacataggaaaaaaggcccctatacatgcatgctaaaacgaccgccagtgtgctgctaagtattaaccacaccattccagcatttgttgctcttttgaaacagccaccgaagcttgcgaacatggaaagttacagtttgttttacttgatggagtttggcaaagtgttgatgccgattatggtgatggttgtgatttttggtttgatgaactacggcgtgcaagtcgggattttattttccgcgaaagcagtgaaacctcagttcaaacgactaaatccagcgaactactttaagcgagtgttcagtgtgaagggaattgtcgaggtggtgaaagcgctacttttaattacgttgctttcatacgtggcgtatattggctttcgggatcatctagacacgctcattagttacaccgggcaaaattggctttactcactcggacaaattttcgctttattcaaaaatgaatttctggcgctcttccttgtaatcgcagtaatagggctgcttgacttcttttaccagcgttatgactataaaaaaggcttgcggatgtcgaagcaagaaattaaggacgaaatgaaagattcagaaggtcgaccggaagtgaaacagcgccaaagaagtattgcgcgtgggcttctccaaggttcgattacgaaaaaaatggcggacgcgacttttgtggtgaacaacccgacacatatttccgttgtgatgcgttatgacaaaacaaaagatcatgcaccgaaattgctcgttaaaggggaagacgagctggcactgtttattcgtcaggtggcggatacggacggggtgccgatgattacaaatagacaactggcacgaagtatttactatacgacgaatccagatgaatacatacaagaagatttatataaagatgttattgaagtgatgaaagaattgatggacgcagacaaaatcaagttctaacaacatatgagcgacctttctaatcttagaaaaggcaggtttcaaaatggggaatttaggtgctataaaaaaatattttgctatcttgattgcggtctcgtttgttattgcacttattgtgccattacctccgtttgtattggatttagtgcttgtgacgatcttggcgttctctgtgttagtttacatgcgtgccacatcaattaaagattggaatgaattaaagtcatttccgtctttactacttttgatggggatatttcgggtttcgataaatatttcgacgacacgggcgatcttaactactggtgatccaggacaagtaattaaacaatttgggaattttgttattggtagtaattttgttgttgggattgttattttcattattttaatcgtctttcagtttattgtggcaaatggttcttcgcggacagcggaggtagcagcaagatttacgctggatgctttgcccggtaaacaaatggcgattgatgcggatttgaatcaacggttgattacagagccggaagcgaaagaaaaacgcgcatatttgaatatggaaaccgaattctacggagcgatggacggagctgggaaatttgtaaaaggggatgttctttttaccgttttgcttgcagttgtaaatattgtattcggtttaattgtcggtatggtccaaggtgggctttcgttcggggaagctgcggtgaaatatacggagttaacaatcggggatggcatcgtgagccagattggttcacttttaatggcgatgtcagctggggttattgtaactcgggtatttgacggatcagatgataacgttgcggtcgggattttcaaagaattaatgcaaaactcggtggtcgtttatacgctcgctgccatgtttatcttaatgggtgtatttagcccactaccaacgattccatttgttggaattggcgtagtgcttggaataatcggctatcgtacgcaattcaatttaaagaaaaaagagcaattggaacttgaaaaagaaatggagcttatccagtcggaaaccagctctgctgaagcggaacacaatcaagcatttggcgcagcacgagaaaaattccctgtagttgtggaacttggcttaaacattgcggctctcgtgaaacaaaaaatgaacggagaaacggcaaaagataaagtcgtcttaatgcgaaaatcaattttacaagatttaggtattggggtcccggggattaattttaaagataatacgagttttcagccgcgcgggaaatatgagattaaggtcaaaggtgtggctgttgcgagcggggttttaaaggcaggacatttattagcgctaaaaacaccaggcgtgatgatggaccttgatgcggagccgaccaaggatccgattttcggggaagatggttactggattttgccgggtgagttagaagatgcgcagatgaaaaactatcaagtgctcgaaccgcttagtattttaattacgcatttggatgttgtgctgcggaagaacttgcatgagcttctgatgcgccaacaaattaaagatttaattgacggacttgctgatgaaaatcaaattttaattgatgaaattaagaaaaaagaaattgattattcgctaattcaaggggtgctacgacaactcttgaaagaagggatttcggttcgcgatttaccaacgattgtcgaagggattattgatggacaaacgatttatccgaatgatcttgatggcattacggcatttgtcagggagcggatttcgaaagtcatttgtgaacaagcgaaaaatcaagatggcaaaatttacgcgctacttttgcaagattcgattgaaatggatacagaaattgtcaacacgccgtattatggctacgcgctgaactgggcgctcgacaaggaactgccaatcattcaaaaagtaagagataccgtgaataaagcgcaactcactggtcgtgaacctgtcattttaacaaggcgaaaagattttcgatttggctttgtgcgagttttggaaagatatcaattggacgtgccggtgctctccattagtgaactgtcgccggaaacagaagtggagcaaattgcactgattgaaccaacttgatgagggaggtaatccgtagaaatgggaaaacatttagtagaaaagatggaaatttttaaggcgaactccaagcgagaaatacataaaaaaattcgcttagtcacgaatgagccatataaaattacggatgaacgtgtcacaaagcttgggatttttaagaaacagtatgaagtgacggcggtcattatgagtgaagtggcgatagcagatggtcgaatggactttcaagaaacatttcaaaaatcggttgtcaaaaacagaccgaaaacagacgacttattaaaaaaagaaaaattactagaaatgcttgctgcgggagcggaactagcacagtcaacgccgcttttagaagaacgaaaaacacaggaagaagaattgtcagcgatgcgtctcgaactagcggctttaaaccgcgagcttgcagtgaaaatgcgcgaggagcgtgaacaaaacagtgatttcgtgaagtttttgaagggtcgcggaattagtgatacgtatgtggcggacttcatgcaggctgggcggaagcagtttaagcaagtagaaacggcgcatttggatgatattacagattggttcgttccttatttctccggaaaattagcggtggaagattcgtttgatttaagcaaccaccggattatttctttgattgggcaaacgggtgttgggaaaacgaccacgcttgtgaaacttggatggcagctgttaaagcaaaatcggacagtgggctttatcactacagatacttttcggtcaggcgcagtggagcagttccaaggttatgcggacaaactcgatgcggagcttatcgttgcgacgagcccggctgaactagaagaagctgtgcagtatatgacgtatgttaactgcgtggatcatattttgattgatacggttgggagaaattacttagccgaggaatcagtgagtgaaatttctgcctataccgatgttgttcatccggacttaacgtgttttacattttcttctggaatgaaaagtgcggatgtgatgacgattttaccaaaactagcagaaattccaatcgatggttttatcattacaaaaatggatgaaacgacgcgtattggtgatttatacacggtgatgcaagaaacaaatttgccggtgttatacatgacagatggacaaaatattacggaaaatattttcagaccaaaaagtcgttggttagcggagcggtttgttgggacagatagaaggcgggtgctggaatgaaggggttatacattggcgcagcagggatgatgaactacatgcaacatattcaagttcattctaataacgtggctaacgcgcagacgccaggattcaaatttgatcagcttacgagtgaagtgatttcgcgaaacaaagtgaactatcaaaatgggcctgtcgctaggcaagttgggacaattgattacggtgttcgacctgctgcgacgcatattaatttgacagcgggatcaagctatattacgaaccgcgaccgagatttctttatgcaagacacggatcctacgcaaggaagtaattttttcatcactgctaaaaatggcgaaatttcactttcacgtggcgggcagtttcactccgatcagtttggttttctgcggacagcagatggcgccaatttactcagtgcgactggggaagcgattcaagtggggcaaaaaacgtcgattcgcgccgaagcaaatggtgatttatacaatgcggaaacaggtcaatacttgggccgccttggaaccaaatttgtttccgctaatcaagcagatagtttggtgaaagacggcgaaggtagaattcatgt

SEQ ID NO: 3839 - DNA, 3470 bp, Listeria monocytogenes 4b
  misc_feature (1)..(end): n can be any nucleotide: a,g,c or t/u
cgataagtcaacctgcatgcatgcctcgagcgccgccagtgtgctggaaagataattagtcttaactataatagcctaaaaaatggattgaaaaccttttaaaaaaattttttctttcaaaaaaaacgtcgttgtcacaaattcaacacaaaaagtactaattttagactttttcagcacatagttgacaattgatggcatccagcgtaatatataacttaatttaatagtattttcttatcacgaaaggtggagggactggccctttgaagccttagcaaccggaatttattttcacggtgctaattccagcagtgtgttctgaaagataagtcggaaatgcaagtttaggaaactctatcctctctggcggcttatatactgctagggaggttttttgatggaaattcctgataaatacatattaaagaggagtggattttatgagtaatgagtataaattcgaaacaattcaagtacacggcggacacacaccggacggagatacgcattctagagccgtaccaatttatcaaacgacgtcatacacatttgatagcccggaacatgccgcagccttatttggtttacaagaaactggaaatatttatacacgaattatgaatccgactacagctgttttagaagaacggttaacgctacttgaaggcggtattggtgcggttgcaactgcttctgggatggctgctattacttactctattttaaatattgcgggttctggagatcatatcgtcgcagccgcaacactctatggcggaacgcacacgctattttcccatacgtttaaaacttttgggattgacgtaacgtttgttgaccctaatgaacctgaaaattttgaaaaagcgattaaagataatacgaaagctgtttttatagaaacaattgggaatcctgatattaatattgtcgatatcgaaaaagtagcagaaattgcgcacgcatccgatatcccgctcatcgttgacaacacattcgcgaccgcttatttgaatcgcccgtttgattttggcgcagatatcgtcgtttactcggcaacaaaattcattggtggtcacggggttgcaattggtggtgcggttattgactcaggtaaatttaactgggcaaatggcaaatttccaaagctagtggtaccagatgatagctacaatggtttgtcttatacaaatgacgttggcgcggcggcatatattaccaaactacgcgtctcactccttcgtgatactggcgcagcactttctccgttcaacgccttcttactcattttaggcctagaaacactatccttacgccttgagcaacacgtgaaaaatgcgaaacaagttgccaatttcttaaatgaccatccaaaagtagcttgggtgaattatccaggtttgagcgacaacaaataccacgaattagcccaaaaatatttaccaaaaggacctggctccattttcacatttggagttaaaggtggctacgaggctggtaaaaaagtgattgaatccgtggaattattctcgcatttagcgaatgttggcgacgcaaaatcgcttatcatccatccagcttccacgacccatcaacaactaagcgaagaacaacaattaacagctggcgtgaaaccagagtccattcgcctatctatcggaatcgaaaatgccgatgatattatccaagatttaacgaaagcattagagcaaatttaggaggaagtgaagagaagtgaccttacaacaaaaagaactatttcaaaaaagtcctcttctgcttgaaaatggagaaacattaagccctgttttagtcggctatgaaacatacgggacactttccgcctcacgcgataattgcattttattagaacacgcccttactgggacggcacatgcggcgaaacattttgagagtgacgctcctggttggtgggatgattatattggtccggggaaaacgattgatacagacaaatattttctggtttgcaccaatgtatttggtggttgtagtggcacgactggaccttcttcgattaatccaaaaactggcgagcctttccgcttacagtttccaggtttttcgattaaagatattattaaagtgcagcgtgaacttttggagcaacttggggttacgcgaattgtttcagtgattggcggatcgatgggtggtatgcaggcgacggaatgggcgattgattatgccgatatcacggatagcattatcaatatcgcctccccgctcgctgctggacctgatgcgattggttacaacttgattatgcgcatggcaattttgaacgaccctgactttaatgggggcaactatgttggtcaacctgagggcggacttgctactgcgagaatggttgggatgatgacttaccggacgagcgaacttttctcgaaacgctttgaacgtttcactgtcgccgagtcttctcctgccgctttttcaaaggagcattttcaaattgaatcgtatttgcaatatcaaggggatacttttgtcgagcgatttgacgcgaatagctacttatatttaacaaaggcaattgatttgttcgatgttactgctcccgcgaaagatgatttgcctgcctttgcgaaaattaaaattccttatttgctgattggcatcacgacagatcaacttttccgaattcatgatttgcgccgcggttacgagcttttaaaagaatgggatgtgccggttacttatcatgaagtggcctccgaatacggtcatgacgcttttctagtcaaaaaagaagtcccgaaattcgaaccgctcattcggtcatttttaagtaatttacctgttaaaagcatataaaaaagagacctcggaaaatttccggggtctcctttaattagtctttataaattgatttcgttcggttaagccaagcatagccgagtccgataacaaggcctccacctacaaaattcccaagtaaagcaagtactaaattgacggtcacattgcccgctgtcattgcagcaagtgttccaccagaagcgaaaaatgctaatgagaaagaggagaagttggcgataacgtgctcaaatcctaagaatgcaaagatgaaaataatgaaaatcatcgcaatgactttaccagcatcatctttcattcgaagtgtacaaagcacggccgtatttacaacaatattggcgaaaataccttctacaaaaatttgtagtggcgctttttcaagcttaccgctaacagcagtaaataagaaatggtcagcaggtaaattatggaaaacggatgttagggaaactaagtacccggcaagaattccacccaataaattacaaacaatacataaaagcaaaatttgtaatgcttttcctggtttaacaattttttgataaacaccagttgtcatatacatcatgttagaagtaccaagctctaacattcatataaataatcataacgagcgaccaact

SEQ ID NO: 3840 - DNA, 6463 bp, Listeria monocytogenes 4b
  misc_feature (1)..(end): n can be any nucleotide: a,g,c or t/u
gagtagcggtggttgactgcttttaattcaatggttactttgaacgcttcaaattctttcgtcgcacgcccaaatcccgtcatgcttttcaccatttggcaagacacctttcataacttaaagttccctctaagattacttgaaatttgttctgacttcttattataccaaagctactccttgcatacaatacattttcggaatgtatgttaaaatagaaagtaactaactcacaaaggaatgaataactaatggcgtttgatgcaatgtttttaaaagcgatgaccgaagaacttgccgaacacggagaaagtggacgtattatgaaaatccatcaaccgttctcgcatgaacttgttttatatattcgaaaaaaccgtgaaaataaacgtttactgatctcctcgcatccaagctatgcgcggattcagtggaccgatgatattcccgaaaacccagcaaccccaccgatgttttgtatgttactgagaaaatacttagaaggcgcgattattgaatcgattacgcaacttcctaatgaacgaattttacaatttagtattcgcggtaaagatgatatcggtgaaaatcgtttttgtgatttatttgtagaaattatgggacggcatagtaatatcactcttgtcgaccgtgcgaaaaatgtgattgttgattgtattaaacacgtttcccctgcacaaaatagttaccggacactgcttccggaagcgacttatgttttacctcctgcaacggataaactccacccatttgaggttacttcggagcagattctggatagactagatttctcagcgggtcgaatggataagcaacttgtacaaaattttgcaggattcagccctttgcttgctcgggaaatagtatttcgtgctgggaacttaacggcagattcgctagttgccgcctttttcgaagtaattgggctagtgaacgagcatttaggccatgcagccgtgccaaacgaatggcgcatccaaaataaagaggattactattttttcccgctccgccatgtcgatgcagaaacaaccgaattcgcgaatttaagcaccctattagaccatttttatattggtaaagcgcgtcgtgatcgtgtccatcaatttgcacatgatttagaaaaactcttatccaacgaactggctcgaagcaggctgaaaatcgaaaaactcgaaaacactttgctcgaaacagaaaaagcagatgtttatcgtattcaaggtgaacttctaactgccaatctgcatttaatggaacgcgggatggaagaaattactgtagaaaacttttacgatgatatgaagaaaatgacgattgcacttgatactagaaaaacaccctccgccaatgcgcaaagctactttagccgctaccaaaaactacgtaacgcggtcgaagtagtgaaagagcaaatcgcgctcacgaaagaagaaattacttacttagagtccgtggaatcacaacttgaaacatctggcccacaagacgtggaagaaatccgccaagaactagctgaacaaggctatcttcgctacaaacagaaaaaaggcagccgaaaaaaagcgactttacctgctccagaaaaatatacttcttcgaccggcttaacgattttagtcggaaaaaataataaacaaaatgattatttaacgaataaattagctaggaataatgaatactggttccatgtaaaagatttgcctggttcgcatgtggtcattcaatcgaatgatccagatgagacatcgattacagaagccgcaatgattgcagcctattattcgaaagcgcgcctttcagcaaccgtccccgttgacggcacgctcgtaaaacacgtgaagaaaccaaatggtgccaaacctggttatgtcatttatgataaccaaacgacttatttcgttacacctgatgaaaagcttgttttagagttaaaaaattaacggttccttcctggagccgttttttctttctaattttagggtagatgtgtactgactttacttttttattggaaggatgatagaggaatgaaaattttattaattggtgcttctggtacgcttggctctgcggtgaaagaacgtttggagaaaaaggccgaagtgattactgctggtagacatagtggtgatgtgacggtggatattacgagtgtcgatagcatcaaaaaaatgtacgaacaggttggaaaagtagacgcaattgtttcagccacaggaagcgccactttttctcctttaacagaattaacacctgagaaaaatgcagtgacgattagtagtaaattaggtggtcaaattaatttagttttgctgggcattaactcattgaatgataatggaagcttcactcttactactggcattatgatggaagatccaatcgtccaaggggcttctgctgcaatggcaaatggcgcggttacagcttttgcaaaatctgctgcgattgaaatgccacgtggaatccggattaatacagtgagcccgaatatattagaagaatcttgggacaaactagaatcatttttccaaggtttcgttccagttccagccgcaaaagtcgctcgtgcgtttgaaaaaagcgtctttggtgcacaaactggtgaaagttataaagtatattaatagaaaaagaagctcaccgtaacaaaggtgagcttctttttattttccccagttttctggatttttcttccattcttttaatgtttccatatcttcaccagtcacgtaattttcatttaaagctacttcaattagctcatcatagttcgttaatgttactagttttgtgccagattcttctagcagttgttttcctttagcaagtccatatgtaaatatggccgcgattccaactacttccgctccagcttcttccagcgcttccactgcttttaatgaacttccaccagttgaaatcaaatcttcaatgaccactactttttgacctttagaaattggtccttcgatttgattccctttgccgtgttctttagcttttgatcggacgtagaccattggtaaatctagtaaatcactcacccatgcagcatgtggaataccagcagttgcggtgcctgcaacaacatctacttcaccaaaggtttgcttgattttttcggctaatgacttggcgataaactgacggacttttggaaagcctagcgttaggcgattgtcgcaatatataggggatttaattccagatgcccaagtgaaaggctcatttggttttaaaaatacagctttaatttctaataattgttcagctacttgtttttcgatgctcatgcattccactcctttaaaacttgattatacgcttctaccgggtcgtttgcgcgcgtgatggaacgaccaacgacaatgtttgacgaaccaatcaaacgcgctttttctggtgttacgacacgaatttgatcgtcggctgcgtcgcttgctaatcggatgcctggtgttacacgtaaaaaatcagcgccattttgttgtttaatatcttctgcttctagcgcggagcaaacgacgccgtctaaaccagcttgtttcgataaattgctataatgcatgacggattcaagtagacttgtttttattaattgttctgtttgcatgtctgtctcacttgtacttgtcagttgagttacggcaataatttttggacgtttgccacttgaagaacctatttccagaccttccctggcagcttccatcattttcttcccaccagccgcatgtacattaaccatatctacgcctagttttgccaagccaatcatcgcacttttgacagtgtttgggatgtcatgcagttttaaatccaagaagatttcatgatgttgttgctttattttttcaacaatgattggaccgttgctataaaaaagttccatgccgactttcacggatagcgtttctcccgaaaatttggctaaaaaggtctctacttcttcgtaagtctggaaatctagcgcgataattggtttattcattgatttgttcgctcctttttaagttcttgtagggaagaaataccgagttcatccattcgttttggtagttcgctaattaatttcggacaaataaatgggtcggtaaaattcatcgtgcctactgcgactgcatctgctccggcaatcaagaattctaatacgtcatctacagtttgcacgccgcccatgccaatgatagggatattgcttacctcgcggacttggtgaatcatccgaatagccaccggtttaatcgctgggccagaaagtccacctgttccatttgcgatgattggttttcttgtttttaaatcaatacgcatgccgagtaaggtatttatcattgtgagtccgtccgcaccagcggcttcaattgcttgcgcgatggaaacaatatccgctacattcggtgataatttcacgtaaactggcacagttgcgacatttttcacggctttcgttaaacgatgcgcaacatccggatctgttccaaatgcgatacccccatgtttcacattgggacaggaaatattaagttcgatggctttcactgctttcgattccccaattctggcgcagacttggacataatcatcctccgtcgcacccgccacattagcgataatcggtgtttcaaattgttctaaaaatggcagttcgtgcgccaaaacatgctctagacctggattttgtaagccgattgcattcagcatcccgctcgcggtttctgctactcgcggagtgggattcccaagtctaggttctggcgtcacggctttggccataatcgcaccaagttcatttaaatcatagtatttgctatattcttgtccgaagccaaaacatcctgatgctggcataatcgggtttttgagcgataatccaggaatttctactgctaatcggttcataaactcacctcatccgcacgaaatactgggccgtcttcgcacactttaaattgttttttcgcatcatctgcttttggacaaacacaagcgtagcaagccccaataccgcatgccattcgttcttctaaagaaagatatgttttcgtttccggaaaactagctttcacggcctggagcatcgcttttggtccgcaactatagatgacatctggttcttctggaaaattgttcgtgatgtctgtgacgaaaccttgtgttccaagtgagccgtccaccgtcgcaatatgaactgtgccatatgcattcatttctttttcataaaaactatctttcgcagattggaatccatttacaaacgtgacttgtacgccttttccagctaactctttaccgagttgatacataggagggacaccaattccacccccgattaaaagagcggtttttggtgcaggtgtctggtcgatatcgaatccttttccaagcggacctaacacatcgatagtatccccttctgaaagtttactgaaatctcttgtcccgtcaccttctatccggtacaacagaatgcatgtctttgcggttttatcgtaagaacaaatacttatcggtcgtctcataagtaaatcagaacgactcggtttcagcattaaaaactgtcccggtgacatatcggctacacgttcccctgtcaaaattaattcgtatactttatctgcaatttcggtttgctgaatgaccttcatttccgtctgtaacacggttccaccccgtttcttctatttaaacacgtgctttaggttgttttacttcactggtattcatcgattcgagttcaaaagagcgcgattccagtacacgcaagattgcttccgctgtatcgagcgaggtacagaccggaataccattttctacagattcgcggcgaatttggaagccatcacgctcaggtcgtttaccagtcgttaatgtgttcactacgagcgttacttggccatttcgaatataatcgatcaacgtttcttgattttctccaatttttttcacttgtgacactggaatgtctgcttcttctaacgtgcttgctgttccttttgttgccataatagtaaagcctatgcgattaaatcgtttcgctagttctacggcttcttctttatcgcggtccgctacagttaaaagtactgtcccgtagtcatgcatcgttgtcccactcgccacaaaacctttgtagagtgctttttcgagcgtcacatctttccccataacttctccggtcgatttcatttcaggtccaagcgacgtatccacactacgcaatttcgcgaaagagaacaccggcactttgacaaaaatttcttgtttttctggggcaagtcctggcgtgtaaccaaggtcgattaagttctcccctaacataactcttgtcgccacattcgccatcggaatttcggtaattttacttaaaaatggcgccgtccggcttgagaacggatttacttctataacctttccagcacactgctggccgcta

SEQ ID NO: 3841 - DNA, 3970 bp, Listeria monocytogenes 4b; identical to SEQ ID NO: 2038
  misc_feature (1)..(end): n can be any nucleotide: a,g,c or t/u

SEQ ID NO: 3842 - DNA, 6273 bp, Listeria monocytogenes 4b
  misc_feature (1)..(end): n can be any nucleotide: a,g,c or t/u
caccatgcgctggaaagaactaattcgtcttgatgaagatgaaaaagtagctactgttgcaaaagtgccaaaagaagaagatgaagttgagcttgaggaagaaatcgatgaaacattaatcacacaagttcctgatgaaagttttgaagatgctcctggaagcgatatagaagaataaaatcaagctggagatgactctaatttgcgaattagaacgattttccagcttttttccagtataaaaagcgctttttggctataatttatgtataatatccttaatacgtcttaaaaagggaagagttgaacaaatgcgcaaactgattcaatttctgtttatagcagtagttttatttttagtggaatactttttaatcaatcaagcagctatattattcttagtaacaagtggacttatccaattatgcggattaattattgtgattcggctactactctttgatcaacggaatactagctcaaaagtcgcctggattgcggttattttcattttacctgtacttggaacgattagttaccttgtgtttggtagaaatccagcaactagaaaattcagcacagctcaagtaatggaaaaagctaaattaattaatgcgattcacgcaattccaaacaacactaatgaaaaattaccacgactatctaaaagaattgcgcatttaacgtccatagagccaattaaggggaataaaatcgaaatattaacaaatggcgaagaaacttttccagtgctcttagacgcgcttagaaaggctgaaaaccacattcatattcaatactatattttcaaaacggatgaaatttctacaaagattcgtgatattttggtagaaaaagcaaaagcaggcgttgaagttagatttatgtttgatgggcttggatcaagcaaactgggtaaagcctttttagctcctttgaaagaagctggagttagtattcacgcatttgacccaattacctctccctggattgtaagaacagccaatttaagaaatcaccgtaaaattgtcgtgattgatggtcaaattggctttacaggcgggcttaatattggagaagaatatcgttctaatacaccagatttccgtgtttggcgcgatacacatattaaaatcacaggccaagctgttatcgaacttcaagaatcttttctaaatgattgggtctatatggaaaaccaagcaggtgctgcagatcaatttattagtgaagctggattacaacaatatttttcaccagttgatgtgggtgacgaatgggcgcaagtgatttacggcggaccatatgataaagaaaaatgggttcgcgattcgatgcttgatttaattgattccgctaaagaatctgtttggattgtgtcgccttactttgttccagatgaggagtcgcttgcagttattcgccgggttgcgatgagcggtgttgacgtgcgagttattattccaggcaaaggtgatcgcgggatttcattccacggaagtaatgcgtatgtgaaaacaatgattgaagcaggcgcgaaaatgtatgcttatgccgatgattcttttgttcatgcgaaggcaatgctagtggacgggacgcgtgcagctataggtactgccaattttgacgtgcgtagttttagattgaatcatgaattaatggtattcttatatgatgaaagcgaggctatgcatcatttaaaacgtgattttgagaaagattttgaagatagccgactttttacgatgaaagatatggaaaacaaaccattattgactcgtataaaagaagttctatctagtttactatcaccaattttataatttaggagtggaaaaatgagtggagatttaaaacttagaccgcttgaacgagaagatttaaaatttgttcaccggttaaataatgacgcgaaaataatgtcttattggtttgaagagccatatgaggcgttcgtcgagcttcaggagctatatgataagcacattcacgatcagtcagaacgccgttttattttagaattagatggccaaatggttggattagttgagttaatggaaattgattatattcacagaagagccgaatttcaaattattattgatcctaagtttcagggacacggttacgctgtttctgccacaaaactcgcaatgaaatatgcttttcacgtactaaatctgcataaactatatttagttgttgataaagtaaatgaaaaagctattcatgtctatgaaaaagttggttttattcgtgaaggcgaactaattgatgagtttttcgttgatggaacttatcatgatgctattagaatgtgcattgtccgacatgaatatcatggaatggatattgaaaaaggtgattggcgcgggcagagttgcgccaatcattgttttgggtcaaaaaaagttctataataaggttttagtgaaaaaattatggtatcatgaagtattaaagtttgtactattttgatggagaaaggattggcgtacattggctacaggcattgggacagctaaaatgatattatgcggagaacatgcagttgtatacggagaaccggcaatttcagtcccatttacacaagcagttgtaacgacaaatgtagaaaattctacaaaaaccaaattttcttcggcatttttttcaggtgatttagatgatatgcctgatttcttagcaggaatcaaagcattagttgtagatgttttaaatgagattggaaaaggcgaatgcgtttctatccatgtagtttcaggtgttccaattggacgaggtttaggttcaagtgccgctgtagcaacaagtattgcgcgtggtttatataaatattttaatcaagaattagactcgaaaaaattattagccattgtgaatgctgcagaaaaaattgctcatggcaatgctagtggtgttgatgctatcacggttgtgagtgaaaaaccagtatggtatgagcgagatcgaaaactagaaattatgcatttttcaaaaaaaatcacgttcgtagtagcagatactggagttccaagtgaaaccagagacgcggtgaaggatgttcaagctttatataaagaaaatcaaacagaaattggtaaaataattcatcaactcggcgatatttcccgggaaataaagactcatttagaaggcgatgcagatactgtgaaaataggtgctgcaatgaataaggcacaatcttatttagaaactttgacagtaagtgatagtagtttagagaaattaatagaagtagctagaagtagtggtgcagacggggcaaaacttacaggtggcggtagaggtggatgtattatcgctgtagcaaaaaatcaagaaatcgctgaacaaataacgaaggagcttcataatgctggagctgcacaagaatggatttttacgattggagaaggtagttatgaaagcgacagccatcgcacacacgaatgtggcgctaattaaatactggggaaaacgcgatgaacacttgattctacctgcaaacagtagtttatccttcacggtagataaattttatacaaaaacaacggtagaatgggacggaaatttagcccaagatacatttattctaaataatgaacacaaaacggatgcaaaagtagctcgttttatagataaaatgcgtgaagaattcggtatttcagcaaaagcaaaaatcacttccgaaaatcacgttccaactgcggccgggcttgcttcatcggcttctgcatttgcagctcttgcacttgctggatctagcgctgctggcagaaaagacacaaaagaatatatttccagactggctcgtttcgggtctggttctgcttctcgttccgttttcggagattttgtcatttgggaaaaaggcgaactcgcggacggtagtgattcatttgcagtacctttcaccaacaaattatgtgataaaatgtctcttgtagtcgcagtcgtttcggataaagaaaagaaagtttctagtcgggatggaatgcgcctaactgttgaaacatcaccgtttttcgaaaaatgggtttctgctgctgaaacagacttggaagaaatgaaacaagctattttggatgaagatttcatcaaagtgggcgaaatcacagaacgaaacggaatgaaaatgcatgcgacaacgcttggtgccgagcctccatttacttattttcaaccgaagtcccttgaaataatggatgctgttagagaattacgagaaaatggtataccggcctattttacaatggatgctggtccaaatgttaaagttatttgtgagcgtgaaaatgaaaatatcgtagcagataagttgtcaggtttggctaaaaacgttctaatttgccacgctggtaaggaagcgagtgttgtatcagatgaaaaataaactacaggttaaaatacccggaaaattatatgtagctggtgaatatgcagttgtagaatcaggtcatacggctattctaactgcagttaatcgttatataacgctaactcttgaagatagtgaacgcaatgaattatggattccacattatgaaaatccagtttcatggccaattggcggagaacttaaaccagacggggaacattggacgtttacagctgaagcaattaatatcgcgacaactttcctgaaatcagaaggaatcgagctaacgcctgtgaaaatggtcattgaaacagaattaatcgaccaatctggcgcaaaatatggactcggttccagtgcagcggctacagttgctgtaatcaacgcgctaatgacgaaattttatccagaaatatcaatgcttaaaaaattcaaacttgctgcactttcgcatttagtagtacaaggaaatggctcttgtggcgacattgcttcttgtatgtatggcggctggattgcgtatacaacgtttgatcaagaatgggtgaagcatcgtttggcttataaatcactcgaatggtttatgaaagagccgtggccaatgcttcaaatcgaaacattggaagaaccagtgccgactttttctgtcggttggacgggcacacctgtaagtaccggaaaactagtttcgcaaattcatgcttttaaacaagaagatagcaagaattaccaacattttttaactagaaataacgagattatgaagcaaataattcaagctttccatacgaaagatgaggaattgctttattcatctattaaagaaaatcgtcgcattcttcaagaacttggaacaaaagctggcgtaaatattgaaacaagcttactaaaagaactagcggactcagctgaaaacatgggtggcgcaggaaaatcatctggctctggtggaggagactgcggaatagctttctcgaaaacgaaagaactagccgaaaaactcgttaatgagtgggaaaagcttggtattaagcatttacctttccatacagggagagttcaaattactgaataatggggatatataataaaagccgaacaacttttaagtaaaagttgttcggcttttgttttaatcatttaaaataaagtaacaaactgaatcttttattcagtcgtattatcttttttagataaattattcgcgtgtataaaaatacccattccaacagctgatataacgccagaggctccaccagaaataatatccataaaatataatacagatgttgcgataataattaaaattcccaataccaactctattattcgaaatattatctttagtttatttcttttcatgtatacactcttttcttttatttagctgtagttattgtcgcagggacatataatacacaatttaaatttacaccttttcctttatcttttttacccattccccatgctaaaccaccaccaaataaactcaaacaaacagcataacgtgatgcgatttttattcctttttttgctaaaaatttccccattcgtttatttgcacctaatccacctatcgtacctgccccccaataaaaatcgttaaaatcaacaacagctttatgagaaaattggatttgcataccccaccatgtatatttagcttttatataagcttttttagatgccttaagaagttgatttggttcatcttcatagatttcttgaactattatgtttccctcaatatgtgtttctgatagtgtttcaacagcttcgatttcagcattatctttccagcacngggcggccgtncaagcatgctcccantgactacagtcctnntncaaaaaggaaagcaccnnanctccctccaaccnncctcaccc

SEQ ID NO: 3843 - DNA, 6153 bp, Listeria monocytogenes 4b
  misc_feature (1)..(end): n can be any nucleotide: a,g,c or t/u
tacttacaacagctatgacaccggcaaaaatagtagaagtagtttcacaaatgaacgttgtcgaaatgatgatgtcgatgcaaaaaatgcgctctcgcagaacaccaacaactcaggcccacgtaacaaacttgcgtgataatcctgttcaaattgctgcagatgcggcagaagcagcaattcgtggttttgacgagcaagaaacaaccgttgcggtagttcgttatgcaccttttaacgcgcttagtttattagtaggttcgcaaactggccgtggtggcgtattaacgcaatgttctctcgaagaagcaacagaattagaactcggtatgcgtggtttaacttgttatgcggaaacgatttctgtttatggtacagaacctgtatttacagacggagacgatacaccttggtccaaaggtattttggcaagtgcttatgcatctcgaggtctgaaaatgcgcttcacatccggaactggttctgaagttcaaatgggttacgcagaaggtaaatcgatgctttatcttgaatctcgctgtattttcattacgaaagcggctggtgttcaagggttacaaaatggttcgattagttgtatcggaattccgggagccgtaccaagtggtattagagcggttcttgcagagaatttaattgccgtaatgttagatctagaagtagcttctggtaacgaccaaacattctcgcactcggatattcgtcgtacagctcgtttattgatgcaatttttaccaggaacagattatatttcctctggttacagtgcaacacctaactatgacaatatgtttgctggttccaattttgatgcagatgactttgatgattacaatattttgcaacgtgatttaaaagtagacggtggtttaacgccagttaccgaagaagaagtcgttgcagttagaaataaagcggcacgtgtaattcaagctgtctttgataaattaggtcttccagaagtaaccgatgcggaagtagaagcagcaacgtatgcacgtggaagtaaagatatgccagaacgtaacatggtagaagatattaaagcagctgctgaaatgatggaccgtggtgttactggtctggatgttgttaaagcgttatctgctggcggattcgatgatgttgctgaaagtgtactaaatatgttgaaacaacgtgtatctggggacttccttcatacatctgccatcattgataaacactggaatgtcattagttccgtcaatgaccctcatgattatgcaggtccntggaaccctggttatcgcttagagggcgaacgctgggagaaattaaaagatattgctgttgcagttgatgcaaacgaattagaataagctacttcccattttttataaaggaggattaagagacatggttgaaattaacgaaaaagtactccgcggaattatctcggaagtactagatgaattacagctaaaagaagataaagtttctttccaaaaagaacagccaagtgttgcagtttcggatgaaagctttttaacagaagttggggacgcggagccgggtagacaaaaagatgaagttgttattgcggtcgcgccagcttttggtaaatatcaaacaaaaaatattgtcggtgttccacataaacaaattttacgagaagtgattgcaggtattgaagaagaagggttaaaagcacgtgtggttcgtgtattccgttcttctgacgtagctttcgttgcagtagaaggcgacaaattaagtggttctggcatttgtatcggcattcagtcgcgcggtacagcattaatccaccaaaaagatttacaaccactttctaacttagagctattcccgcaagcgccattaattacgctagaaacataccgagcaattggtaaaaacgcggcgaaatatgccaaaggtgaatcaccaaatccagtgccaatggtcaatgatcaaatggctcgtccgaaattccaagccaaagcagctttacttcatatcaaagaaacaaaacatgttgttcaagggaaaaacgcagtcgaattacaagtaaactaatagtgaggtgaaaatgatgaatcaagaagcactagaaaatatggttagaaatattttacaagaagtaaatagtggcgcagtctccacaacaacttcccaaaaagtgagcggagatacactgacagtacgagattatccactcggaacaaaacgtccagaacttgtaaaaacatcgacatcaaaatcattagacgacattacgttgaaaagtgttctagatggcacgatcaaaccggaagatgttcgtgtaacagcggaaacgcttaaaatgcaagcacaagtagcaagagatgccggacgtgcaacactcgcgaataatttcgaacgtgcagcagagctaacgatcgttccagatgaacgcattttagaaatttataatgcaatgcgtccgtatcgttcctcaagagaagaattacttgcaattgcggatgaattagagagtgtttatcatgcaactatctgttctaattatgttcgtgaagcagcacagctttatcaagagcgtaagaaattaaaaggcgataattaaaattctccttttgctcgcgattatgtaggaaatgcggtgaaatgaatgaagtatattgcagggattgatatcgggaattctacaacggaagtggcacttgcgatggcaaactattcgaaggaagtagcgtttgttgctagtgctattacggacacaaccggtatcaaaggaacaaaacaaaatcttcacgggatttttaaagcgttgcgacttgctttagagaaagtaaatgcgacaaccgagaacttagccgaaatccgtatcaatgaagcgacaccagtgattggcgatgtggcaatggaaactattacagaaacaatcattactgagtctacaatgattggtcacaatcctaaaacaccagggggacttggtatgggttcaggtgtgacggtgctgttggatgacgttacatctaaatcaaaagatgaggactacattgtgattatcccgaaaacagtcgattttgaagatgcagcaaagcaaattaatacttacgtcgaaaatggctatcaaatcacagctgcaattcttcaagcagatgatggggttctcgtgcataaccgactaaaccataagattccgattgtcgatgaagttggttttattgataaagtgccggtcgatatgttagcagctgtcgaagttgcagctcccggaaaagtcattgaaaccatttctaacccatatggtattgcgacagtatttcatttgaattcagatgaaacgaaaaatatcattcctgtggcacgagctttaattggcaatcgttcggcggtggtgattaaaacgccagaaggtgatgtcaaagctcgaacaataccagcggggcatatcgaacttcaatcaggatccagaacgcagcgtgtcaatgtcgcagaaggttctgagaaaatcatgcaagccattatgtcacttccaaaactcgacaatgctagcggagaaccaggaacaaatatcggtggcatgctagaaaaagtgcgccaaacgatggctgggctaacagataaattaccagctgatatttttattcaagatttgctagctgtggatacatttgttccagtagacgttcaaggtgggcttgcaggtgagttttccatggaacaagcggttggtattgcctccatggtaaaaagtgatcacttacaaatggcagccatcgcctcagaaatcgaacaagaactgcaagtaagcgtcaaaattggtggtgcagaagcagaggctgccattctcggagcgcttactacaccgggaactaatactccacttgccattttagatttaggtgctggatccacagatgcctcgattatcaacggaaaaggagaaattatcgcaactcatttagctggcgctggcgatatggtaacgatgattatccagtcagaaattggccttgaagaccgttatttagccgaagatattaaaaaatatccgcttgctaaagttgaaagtattttccacattcggcatgaagatggcacagtgcaattttttgatacgccgctttctccaacagtttttgccaaagtggtgattgtaaaaccagatggctttgtgccaatacctggggatgtatcaattgaaaaaatcaagttaattcgccgttcagctaaggagcgtgtctttgtaacgaataccatccgcgctttaaaatatgtcagcccaactgggaatattcgagatattccatttgtcgtaattgttggaggatcagcccttgattttgagattccacaattaattaccgatgcactttctcattattcactcgttgctggccgtgggaatattcgtggtaaagaaggccctagaaatgcagttgcaacaggcttaattctagctggaggtgctaaggcatgattccagttgttagtaagccagcaatttattttcatgcagatgtagacgcgaatccagacagtattaaacaagttttatttggaatagaagaagaaggcattccatgtgaattagaaattatgtctttgaaagacgaagtgcaagcagcatttcgagcatctgcgagttctccgcttctagtaggggttacgctgaaaaatgatcatttagtgattcattatcgtaatttacccccagataaaccactattttcagcgtatcgtttttgcgcaaccacactagaaaaccagcgaaatatgggaatgaatgcggcgcgacttgtcaagggtgtaccttttaaataaggaggtgaaggaatgcatcaagcaattggaatgattgaaattaaaggacttgcttcagcgataaccgtagcagatacaatggcaaaagtagctaatatccaacttgtagacacggaaaaagcaaaaggttttggctggattaccgtgaaagtggaaggtgatgttgctgctgtgaatgcggcgcttgaagcaggcgaacaaaccgcaatagcctcagacagttttattgcgaaaaaagtcattcctcgaccaggggaagagatttttacagtattttggccaaaagaagaaatagagccagaacagccggaagtaatggttgaaacagaaaaagtggaagaaaccgaagtcccggcagaagcgacttgcaatctatgtcatgacccgctttgcccacgagtaaaaggggatccaagacaagattgtatccattttgaagaagagaagtaaacccaatttgaggaggaaataataatgaataatgcacttggaatgattgaaactaaaggtcttgttggcgcaattgaagcagctgacgcaatggtaaaagcagcaaatgtatcactagtagggtatgaaaaaatcggttcaggtcttgtaactgttatggttcgcggtgatgttggtgcagtaaaagcagcaaccgatgcaggcgcagcagcagctcgtaacgttggcgaagtacaatctatccacgttatcccacgtccacacaatgatgtagaaacgttgctaccaaaaggtctataagccgtggaaagagaagaattaaaagcaataatcaagcaaatagtaacagataaacttagtggtgtggaaacagagattcctattggagtctctaaccgccacatccatctaacagaaaatgactataaccaactttttccaaacgaacctattcaagtgaaaaaatggctcaaacaaccaggtgaattcgccgctgaacaaacccttactgttgtttcagaaaaaggggaactgcatcgtgtccgcattttaggaccacttcggaagttttcgcaagtagagctttctaaaacggatgcaagaatgcttggtatgaagattccaatccgcgtttccggagatattgacgggacacctgggatcaaactcgtttcgaaacatagcgaaatctgcttaccaaaaggagcgattgtcgcgaaacgccacatccatttaccagaaagtgtggcgcatgaatatggtgtgaaacaaggcgatgaagtatccgttctagtaggttcagaaatgcgaagtcttgttttaaatcattgtacgattcgagtaaacaatcaatttataccagaaatgcatattgctacggatgaagcacctgctgcacatattgct

SEQ ID NO: 3844 - DNA, 6247 bp, Listeria monocytogenes 4b
  misc_feature (1)..(end): n can be any nucleotide: a,g,c or t/u
ttggacttggtggatcaaacggacatttgctcgcactgcaatacgcacttgatcctgtgttgaaggaacttggagcagaaacgatattaaaagggcagtttacggtagacaaacaaattgaacggctcggggatgggctgtatgaaattgaatcttcagcgaaagaacggctagatattgctttaaaccaattcatttcattattaaatcaacaatcagtggaagtttaaggaggagagcgggaaatgacagaagatatttttagagtagcgactgtggatgatgcgccggaatttttggaattgttgtcgagtgcttttcaatcggtgaaagaactaggaattgattggccgtcaacgaatgcggatttagcgatggtgacagaaaatattgttaattcttctgcttttgttttagaacgaaacggcaaattaatttctacgattaccgttcgttttccgtgggagagcagctctccaccttctaaatatccatttgtttggtggtttgcaacggtaccggaacttgcaggacaggggattggcgataaattattaacgtatgtagaagaacgggtacttcgcgacacgctaaaagcaccggcactgacacttggaacttctgctagaaaacacccgtggttgctggatatgtatctacgccgcggttatgaggtctactttgaacatgaggaagacggtgatgtgggtgttatgatgcggaaaatcttaattccggaaaaattcgacgccacactactcggaatacctagctggacataaaaaagggggaaaaaggatgaaaaagaaatatgggattttggcactggctcttacagccgcattaacattaagcgcatgtggaggaaaagaagaaccagaagcagcgaatcaaaaagtacaaacaatcacggttggcactggaacacaatttccaaatgtctgctttttggatgaaaatgggaaattaaccggttatgatgtcgaactagtaaaagaaatcgataaacgtttgcccggctataaatttaaatttaaaacgatggatttttctaatttactcgttagccttggagctggaaaagtagacattgtcgcgcatcaaatggaaaaaagtaaagaacgcgagaagaaatttttatttaatgatgtagcatacaataatttcccattacaattgacggtattagacagtaataacagcataaacagcacaaaagatttagctggaaaacgcgttatcacaagcgcaacatcgaatggtgcgctcgtattgaaaaaaattaatgaagaacaaggcaataattttgaaattgcttatgaaggtcaagggtcaaatgatacagcgaaccaactgaaaactggccgcgctgatgcaacgatttctacaccattcgcggtagatttccaaaataaaacaagcgctatcaaagaaaaagtagttggcgatgttctatctaatgcgaaagtatacttcatgctcggaaaagatgaaacaaaactaagcaaagatgtagatgaggcgcttcaatctattattgatgatggaacactaaaaaaattaagcgaaaaatggcttggcgcagattattcaaaagaacaatattaaacaagggagggtgccattaaaatggataaagcgttcgatgtaaaaatgattgctgattttattccaacgttagctggttatttaccgattacgttgtatattttggcactctcgcttatttttggatttatattaggcgttctactatctttaccaagaatttataagataccagttttagatcaattggtcagagtgtatatttcgtttttccgtgggacgccgattatggttcaactatttattgttttttacggaatcccggcactttcaagcatcgttggcattgatttatcacaaatggatcccctttatgctgcgattgcgacttatgcgttaagcagtgcagcgaccattgccgaagtgattcgcgcaggcgtgaacagcgtggatgccggacaagcagaggcggcttatagtattggtctgagtagtcgccaaacgtttttacgaatcatcttgccacaagcactctatcaagctctaccgaattttggcaatttagtcattggttatttgaaagatacgtcgctcgctttttcgattggagtaatggatatgtcaggaagaggtcagacgctgataacactaagtaatcacgcgctagaggtctatatttctttatctattatttactatttgacggccgtcttactggaatattccttcaaatggattgaaaaacgagttaaaaaagaaaacaccagattcacgagtattttcgatatcgagttataaaggagagataatgatgccgcttgatgtgacttttattggaaccgccgtaatggcaatgttaaaaacgatcccgttaacacttgcgatgactttctttccgatattgttcggtttcattatcgctataggtatgacgttgattcggatgtatcatgtccgatttttagaaccgatagcgaagttttacgtttctttttttcgaagcaccccagcgattctgcatattatgctgatttacctaggcattcccctattggtggattttttgagcaaatcattcggattaggcatttctgcaaacaaaataccggtcgttatttttgtcattatcgcgctgtctttcacggcaggagcttacttaaccgagattttgcgctccggtattattgcggttgatatcggacaaatggaagcggcttactctgtgggatatacgcatggccaagcgattcgaaaagtgctcttaccgcaagccttcatgattgccctaccgaatttcacgaatttgtgcatcggatttttacataccacatccatcgctgccatcgttgcagtcccagaaatcactggaatggcaacaatagtagcttccgacaattacgcgtttctcgaagcatttatcggtgccgcactcatttattggtttttaactattttgattgaagcgattaattatattttggaaaaaaatatcgctaaatatcgaggaggaacagtatgattacaattaaaaatattcaaaaaagctttggtgaaaacaaggttttaaaaggaattgatttaacggtgaaaaagggtgaagtagtaacaatacttggcccaagtggctcagggaaaacaacctttttacgatgcctaaacttactggaacgacctgaaaatggtgaaatttcgatgcatgaccaaataattaactgcaagaaaccatccaaaaaagaagttttgcaactgcggaaaaatacggcgatggttttccaacagtataatctcttttcgcacaaaacggtcattcaaaatgtgatggagggtctaacagtcgctagaaaaatgccgaaaaaaattgcacgtgaaatagcagaacgagagctcacaaaagtcggtttggcggacaaatttagtgcctatccttcccaactttccggcgggcaaaaacagcgcgttggaatcgcacgagctctcgctattaatccagacgtcattttgtttgatgaaccaaccgccgcacttgatcctgaacttgtcggtgaagtattggaagtaatgctagagattgcacgtgcgggtgcaacgatgatcgtcgttacgcatgaaatggagttcgccaaacgagtggcagatcaagtcgtttttatggatggtggactaattgtcgaacaaggtactcccgatgaagtgtttaatcataccaaagaagaacggacaaaacgctttttacaccgagtttcagcggattatttatatgaaatcaaagaagtgaaaaaggagcgtgtcatatgacgattcgattcagtattttggaccaaagtattataaatccaggcgaaaaacctagtgaagctttgcaaaataccgtagaacttgcgcaactcgcagaacaactcggctatcatcgtttctgggttgccgagcatcataattcagacgaaatagctggcgcagctccggaagttcttttagggtatattgctgcaaaaacgagcacaatcaagcttgcatctggcggaataatgctacaacattatagtccatataaagtcgctgaacaatttcatgtgcttgaaaacttagcgccgggtcggatgtcacttggcgtcggaaaagcgccaggcggatttcaaccagcaaccgatgcccttcaaaaagacttcgtaaaacctacgcgaacctttgatgccaaattgaaagaactagtcgattttgtaacccatcattcagaggtggctattgcagcaaaaccacttccagaaaacaaaccagagatatttttgcttggaggaagtgcagctagcgcgaaacaagctgccaaactaggtatttcctttgtgtttgcttattttataaatggagaagaagcagttttaaaagaagcacgcgagctatttgaacagtaccgaataaacacaaaagctagtttccaactagcaccaattgttgtagtagctgagactaaaatcgcagcagaccgacatattccagagcgagagtcaatcaaagtcgagcttgcggacggacgtagagttaatgtcggatcgcgcgaacaagcggaatcctacgtaaaagatatcaaccaaacataccggtttattacccaaagaattggtgcaataacaggaaccaaacaagaagtcggagcagagattaaacgcctttcaaaagaatataatatccaagattttgttgttttaacaccagttaaatctacggaaatcaagcgatactcgtaccaattattaagtgaatcgataaaggaggaagttgtccatggctaacgtcgttgtttggagtaaagtaggatgtcattattgtaaagatgtgaaagattatttaactgagcaaaaaattgtcttccaagatatcgacgtcaccgaccatgattatttgcgagaagtactgcaagcgaaatacggcattcgttatgtcccagtcgtagaaatcggcgatattgaaaaagggacctaccaagcagttacagaaatcggattggaacatttggaaaaagcattgtttgaaaaggaggaagtaaaatgactagaaaagaaacaattcagtttggtgcaattattcacggtgttggcggaacaacagatggttggcgacatccggacatcaaccccgcagcaagtacggatttagatttttataagacacgcgccaaaattgccgaacaagggttatttagttttgtatttattgcagacggcctttttatttccgaaaaatcgattccgcattttcttaatcgttttgaaccaattacgattttatcggcattagctgagtctacggaaaacatcggacttgtcggaactttctcgacttcttttacagaaccatttacactcgcaagacagctctcttcgcttgatcacattagcggcggccgagcgggttggaatctagtcacttctccgcaagaaggcgccgcgcgaaatcatagcaagaaaaatctcccaacccacagcgatcgctacaccattgcagcagaacatttaaaagtggttcgcggactctggagttcttgggaagaggatgcgttcacttataataaagaaaccggtgaattctttaatcctgaaaaattacatcgtttaaatcatcaaggagagtatttccaagtcgaagggccgttaaatatcggccgctcgaagcaaggagaaccagttgttttccaggcaggcgcgtctagtacggggcgcgatttcgctgctcaaaacgcggaagccattttcactcattctgattccttagaagaagccattgaattctatcaagatgtgaaagcccgcgctgaaaaggctggtagaaatgcagatgaagtccgaattttcccaggaattagcccaattgtagcggacacgttggaagaagcagaagccaaatatactgaatttgctagtctaattccaatagaaaatgcggtaacttacctagcacgttacttcgacgactatgatttaagtcaatttgatttggatgctccattcccagaccttggtgatattggcaaaaatgcctttcaaagcacaacagaccgaatcaaaaaagaagcgaaagaacggcacctaacccttcgtcaagtggcaacagaagcagcaacgccaaaaacaccttttataggaacaaaagaacaagtagccgatttaatcgatgtttggttccaaaatgatgctgcagatggatt

SEQ ID NO: 3845 - DNA, 6506 bp, Listeria monocytogenes 4b
  misc_feature (1)..(end): n can be any nucleotide: a,g,c or t/u
cctggtggctaacacggccgccgtgtgctggaaagttgaacctttgcgcatttttgatggcgcatgtcgcaggaagattttcttgatatggaagctaatgcgtgtccgacttgcggatcttgcgcaggaatgtttacagcaaactcaatgaattgtttgatggaaatcctaggtatggctgttccgggaaatggtacaacacttgctggttctgacgcacgccgtgatcttattagagaatctgcttttcatttaatggatttagttaaaaaagatattcgtcctcgtgacattattacaaaagatgcgattgacgatgcttttgcgctagatatggcaatgggtggttcgacaaataccgtattacatacacttgcacttgcaaacgaagctggtgttgaagattatgatttggaacgtatcaatgatattgctaaacgtgttccctacctttccaaaattgcaccttcctcttcttactcaatgcatgatgttcacgaagctggcggtgtttcagccattgttaaagaactggttgatctaggtggcgcaatacatccagacagaatcactgttactggtaaaacgattcgcgaaaacgtagctgatgcaaaaattaataataccgatgttattcatccaaaagaaaatccgtacagcccagttggcggactttcgatgttgtttggtaacatcgcaccaaaaggagctgctatcaaagttggtggcgtagatccttccgtacaagttttcaaaggagaagcgatttgctttagttctcatgatgaggcggtggaagcaattgataaccataccgtccgcgaggggcatgtcgtggtcattcgctacgaaggtcctaaaggcggtccgggaatgcctgaaatgcttgcgccaacatctagtattgttggtcgaggtttaggaaaagatgttgctttgattacagatggtcgcttttctggggctactcgtggtatcgcagttggccacatttctccagaagctgcagctggtggtcctatcgcccttgttcatgacggcgatatcatcacgattgatttgccaaaccggacgttaaacgtggatgtttctgatgaggttttggaagaacgaagaaaagaattaccgaaatttaaagctaaagtaaaaactggttaccttgcaagatatactgcgcttgtaactagcgcccacactggtggcattttgcaaattccagaagatttaatcgactaaaaaatgaggtgataagcgtgattgatacgacgaagacaaatgaaaaagcgacgaaaaagcaaaataaaagtggtgcggaacttttaattgactccttgaaaaagcaacaagtcgagatgatttttggctatccgggtggtgcggttctccctctctacgatgctttttacgactgtgatattccgcatattctaacaagacacgagcaaggagcgattcatgctgcggaaggttatgcacgtgttactgggaaacccggtgtggtagttgtaacaagtggacctggggcgacaaatgtattaactggtattgcggatgcaatgagtgattcgattccattagtgattttcaccggacaagttcatacgcctggtatcggaaaagatgccttccaagaagcagatatgattgggctaaccattccaattactaaatataattaccaagtgcgtgatgttcgtgacttaccaaaaattgtcaatgaagcttttcatattgcaagcactggtcgtaaaggtcctgttgtcgtggatattccaaaagacatggggattatccaaacagagtctgtacgaccagatacgattgatctgccgggttatcaaccgacttattcaccgaacccacttcaactggaaaaactaatgcaatctctttctgccgcaagcaagccactaatacttgccggagctggcgtcaatcatgcgagagctacagctgaattactagaattcgctgaacgctatcaaattccaatcgtgaatacgctgcttggtctaggaagtttcccgcaaagtcatgatttattccttggtatgggcggcatgcacggttcatacgcggcaaacatggcacttacagattgcgatttgctcattaattttggttcccgcttcgacgacaggcttgccagtgcgccaaaagaatttgccacaaaagcaacgattgcacatatcgatattgatcctgctgaaattggcaaaattatcgaaacacaaattccgattgtagctgatattaacgaaacacttacacaactactacaaatggaacttccggttcatccggatacatctcattggtacaaattaaatatgacccgaaaaaaccgtcatccttttaattttgatagaacgaaaaaagcagaaattaaaccacagcgtgtgattgagctaattggtgaaattacgcaaggtgaagcgcttgtttctaccgatgttggccagcatcaaatgtgggcggcacagttttatccattccaatttgatcatcaaattattacgagtggcgggcttggcacaatgggctttggctttccagcagctgttggtgcgcaacttgctttcccagataaaacggtagtcgccattgttggggatggtggtttccaaatgactaatcaagaactggcgattttaaatgattaccaaatcaatgtgaaaacggtcattatcaataacggttcgctcggcatggttcgtcagtggcaagaaaaattccacggcgaaagatattctcattcgattttcacgagccaaccagattttgttaaactatccgaagcttacggtgtcaaaggggttcgcctgacaaatcctgaaacgctagaaaaagatctaagaaaagccttcgctcaccctggaccgattgtcattgacgttcatgtagccaaagatgagctagtacttccaatggttccaagcggcaaaccaaatcaccaaatggaaggagtggaataaatgcgccgaatcattaccgctacagtaaacaactcttctggcgtgttaaatcgtatcactggggttatctccagacgccaatacaatattgatagcatctctgtcggctggaccgaaatcccaaatgtttctcggattaccatcgtcgtccatgtcgattccttatacgaaatcgagcaagtaactaaacaactcaataaacaaatcgatgtgctcaaagtgagcgatattactgacgatgcacacatcgaacgcgaactagctttacttaaaatcaactcccccgctgccttacgatctgagctaaacgcagtcatcgaaccatttcgcgccactgttattgatgtcggcacgaaaaatgtcgtcattcaagtaactggcacaagtgaaaaaatcgatgctttcgttgacacagttcgcccgtatggtattaagcaaatggcgaggaccggcgtcacaggctttacaagaagccctaaaaaaatgggttaaaaatcatttactacagagcagtctcttgctttgctagcatcagaacagcacatcgctattctgaatataaaaagaaattagttggaggttaggaaaaatgacgaaagtttattatgaagatgcagtaaaaaacaacgcactagaaggtaaaacagtagcagtaatcgggtacggctcgcaaggtcacgcacattctcaaaatgtacgtgacaatggcaataacgttattatcggcattcgcgaaggaaaatctgccgaatctgctagaaacgatggcttgatgtttatttctgttagcgaagccgctgaaaaagcagacgttatcatgattcttntgccagatgaaacgcaaggtgaaacatacgaaaacgaaattaaacctaacctaanagctggcaatgcgcttgttttcgcacatggtttcaacattcattttgacgtaattaatcctccaagcgatgtggatgttttcctagtagctccaaaaggtcctggtcacttagttcgccgcacatttgttgaaggtggcgcggttccttccctattcgctatctatcaagatgccactggaaacgcacgcgacacagccctttcctatgcaaaaggtattggcgcaactcgtgctggcgttatcgaaaccactttcaaagaagaaaccgaaaccgatctatttggcgaacaagcagttctttgtgggggtgcaactcaccttatccaagctggttttgaaacacttgtagaggctggctaccaaccagaacttgcttattttgaagtattacacgaaatgaaactaattgttgatttgatgtatgaaggcggcatggaaaaaatgcgccactcgatctccaatacagcagaatatggtgattatgtttccggtcctcgtgttgttacagctgatacgaaaaaagcaatgaaagaagtacttaccgacattcaaaatggtaactttgctaaatcattcattgacgacaataaaaatggttttaaagaattccatagaatgcgcaaagaacaacaaggtcatcaaatcgaaaaagttggtgctgaacttcgtgaaatgatgccgtttgttaaaccacaacattaatacttaattcggattgctaggtgagatttcttgcctagcaaccgtttatcctttttcaatatgagtttaaggaagaacctctttctttcctaaactgatactgaaagcaggaaaaatccaagcttccctatctaatataaaacaagaggtgaaatcgaatgaagaaaatccagttttttgatactacacttagagatggcgaacaaacccctggagttaattttgacgtaaaggagaaaatccagattgccttacaactcgaaaaacttggaatagatgtgattgaagccggctttccgatttcttctcctggagattttgaatgcgttaaggcgattgcaaaagcgattaaacattgttctgtaacagggctagcgcgctgtgttgaaggagatattgaccgtgccgaggaagcgctaaaagacgctgtttctccgcaaatacatatcttccttgcaacgagcgatgtgcatatggaatacaaattaaaaatgagtcgggcggaagttcttgcttccattaaacaccacattagttatgcgagacaaaaatttgatgttgtacagttttcaccagaagatgcaactcggtcagatcgtgcttttctgattgaagcagttcaaacagcgattgatgcaggagcaactgtcatcaacattccagatacggtcggatatacaaaccccaccgaatttgggcaattattccaagatttgcgccgcgaaataaagcaatttgatgatattattttcgcttctcattgccatgatgaccttggtatggcgacagcaaacgcacttgctgcaatcgaaaatggcgcaagacgcgtcgaaggtacgattaatgggattggtgagcgtgctgggaatacggcactggaagaagttgcggtagcgcttcatattcgcaaagatttttatcaagctgaaacaaacattgtattgaatcaatttaaaaattcaagtgatttgattagccgcttgtctggtatgcctgttccacgtaacaaagctgtaattggtggcaatgcttacgcgcatgaatctggtattcatcaagatggtgtcctaaaaaatcctgatacgtatgaaatcatcacccctgcccttgtcggcgtggataaaaactctcttccacttggcaaactttctggcaaacatgccttcaatacgcgcatggaagaaatgggctacacactaaccgaacaagaacaaaaagatgcctttaaacgtttcaaacaactagcagatgcgaaaaaagaagtaacagaagaagacttgcacgcgttaattctcggacaatcttccgagtcagccgatgatttcgaactaaaacatttgcaagttcaatatgttactggcggcgtccaaggtgcgattgttcgcattgaagaacgtgatggcgctctagtagaagacgcagcaactggttcaggtagcattgaagcgatttataatacgattaaccgtcttatgaaacaagatattgaattaaccgattatcgtatccaagcaattacagccggtcaagatgcccaagcagaagtccatgtcgtcattaaaaatgacaaaggcgctgtgttccatggtatcggtattgattttgacgttttaactgctagtgctaaagcttatttgcaagcatcaggcaaaagcaaaaccgccagtaagcaagctgatttcgaggaggtaaaataacgtgacctataaaattacttccttagctggcgacggaattggtccagaaattatgacttctggacttcaagtattagaggcagtcgaaaaaaaatacaaccatacgtttgaaattgaatctcatccctttggcggcgcaggaattgacgtagcacaagacccaatcccttcttccaccttaaaagcgtgccgagacgccgacgccattttactcggagcaattggtggtccaaaatgggataatgcgcc

SEQ ID NO: 3846 - DNA, 5315 bp, Listeria monocytogenes 4b
  misc_feature (1)..(end): n can be any nucleotide: a,g,c or t/u
ataataaagaggtcattttggaagcgcgatggttggtagagaaatatactgaaatgttaaatcagatggatgatttatatcgcactattttgatggaatgttacgtggaacgaaaacaagatgtggcggtaatgatggatttaccgtacgaaattgcccagtttaaacggataaaaaaacgagcagtattagaaatcgcaacgctaatgggaattttagtaaggaaatgatgatactttcgtgatattttgaaacgtcattttacgattaatatagaagtaagctaattgtctagtaagcggatgacgataaaacctgcatcagaatgaaggtgcaccgattttctgataatacaagaggttgtacaagaaatttgtttttatgattatatttttcatccgttgacataaacaaatattctattttggaaagtaaagttcggaggaataaattatcaaatgtggtctcgaccgaattttactttctgtttttaaaggagtgaacgcttggtgaagagtttaagcttcatgagagttttggaagcagtgagaacaatgctccaggaaaaaggcggactagatgtttctattgtaatgcgtgaccaagtggaaatgcctacaacgatgatcgagatgattgatcaagaggaagaagaaagccaaactgcctggaaagaaaaataccgttttgcaatccatcattatacaaatgaaacggacttagcgggagtcgaaatgatagatacgcttatccaaacagggttcactttgcctgaaggatacaaattaatcgctgttcgacattacggaaaacaaaatttagtcaaagaaaatacgttaattcacgcaaaaaccagttttgaagtaagtatttgtcgtgaattaaaagtaaaaatttagggggaaatattaatggcatttgaagagaatttatattgtgattatacaccgggagctgctaaagcggtcgcggggaaagatgtaattttagcagtttttaacgcagcgggggataagctattagcggttgcggggcaacaaggtctaactgtaaaccgttctaaagatagcattgaaattacatctaaagatacagttggcggatggaaatccaaaattggcggtatgaaagaatggtcaattgaaaatgacggattatatgtcgctgatgcagagtctcacaaagaattggcgaaatatttcgaaagtgatagcccggtttgcgtgaaaatcattaatcaagcatctaaaaaaggtcttttcggtggtttggcaattgtagctgactatagttttgaagcaccttttgatgaagcgatgacttactctgtaaaactagacggaatgggtgcgcttgttgatttaacgattactgagggcggagatcaaatgcccggcgaaacacctgtagcaccagcagaataaaatagagagccactgaaataagtggctttcccttaggaggaaaataaatgtttgaagtgaatgatacaacttatattttacgatttaataaacaaaaagttaaaacggtggaattaacatcagggattagtttagttgcagctttgactgcgaataaagggattttgagctaccaagtgattgaaacgctatttgtttcaggacttgtggaagaaaaaggcttagtacctgtaaaacaaaaagaagctttggagattttcgacaaattagtagaagaacaaggcttaatttcgcttaatgtagctgttattgagaaattgcaagaggatatgggttttttgttccgttaaaacagattgaatttgagtattttggtgctgaggacgaataagtggatagtgaaatgaaccatgattttgatttggaaaaacaattcgctttttttgtagttaattttcagatgtccaagcatgattttgaagaacttactgaagtggagaaaaatttcatcatgaaagaatgggaaaacaaggtgatttttgaatctactatgcttcgaaatgcagttttaaatgcggaacaaaatctcaatcgaaaacgaaattcacgttttatcgacttgcataaaaaacgtcagaagaaagccgatgttaattatacagtaaatgcacttcaagcaatttccgataatgaagcgaaggaaggtaaagcgtggattgatcggatttatggtgcaaatgggttacgaagacctaagaataaagaagaaagggggaaagtgaatggcggattctaaaagttttacatttgaactgaacgagagcgttttaacagcgcaagttggcaggctagatgagatggcgatggttgtagagcggcggttttcagagctcaaaatgactattgaagatgttggaaatgctgatccaggttcgaaaatttccgaatctttaggtgggctgcagtctgggcttggcacgattagttcggcgtttggacaactgggttctagtagtgaggcgattacatccggattcggtactgcggttggttctgttggtggaatcacggatgcgtttaaaaatctaggttcaagtgtgcaaaatggtacgttattttcaagcttggcaaccgggattggtggcatgagtacaatgcttggtggagtatctggcggcgttcaaggaattacaaatctagctagtggatttatggaattgaagaagcatctaggcggtttgatgtcatctattggtggcgttggtggaattatgggtaaactgacctctccaatggggttagtaattatcgggattgtagcgttagtagctgcatttgcgtatttgatgacgacgaatgaatcattccgaaatacggtgatgtcagttgtaacacaggttgcgcaactgttcggtcaacttgtcgccagtttaatgccgattatcatgcaaattgttactgcggttatgcaaattggtgccgcgttaatgccgatggttatgcaatttattagcttttttgcgcaattgttagcccaattaatgccgtttattaatatgctgatttccatgcttatgcctgttattatgcagattgttcaagttgttatgtcacttgtttcggcactattaccgagcatcatgacagtgattcaaggcattatgagcgttattcaatttttaattccgataatcatgcaaattgcgacggtggttgtacaaattgttgtaacgattatttcttatataagtaaaattatgccgattgttatgacgattattggcgttattgtttcgattatcacaacgattattagttacgtcgttattattgcgacgacgattgctagtgttattgggaaaattattagctttattgcgagtgttattacggcggttatcgggattgtgcaaccaattattggctttattactaatatctttacgactatcgtgacgattattggtgcagctttccaaatggtatttactgttgcatccaaaatctggaatgccattatgacgacgatttccggaattattgaaggaatcaaagcagtcatcacaggtatttctactacggtttcatcagtgtttaacggagtgaagcgcattattacaggtgtttttgacggaatcaaaagtgcttggggtggtttaactgattttgtaggaaatattttcgatggtgtttcaagtgcaattcaaaccgtggtagataatgtcaaaggttttgtaaacgtcgtaattcgagggattaatggagccattggtttaattaataagattccaggcgttgaaatcggcaaaataccacaattaatttccggtacaacaaatttccaaggtggctttgctcgaatgaatgaaggcggccgaggcgaaatggtggttttaccgtcgggttcgcaagtaattccgcacgatgcaacgatgaaatacgcaagggaaagtgcgcgcggaaataaatcaatgctttacacgagtcaaggcgctgatttggctagagttgaaaatcttctcgagcgcttactacaaaaaaatcctgtaatcaaaatggatgacaaagtggtagccgaggtagttagccgtaaccaagctaactcatttgatcagtacaattacacaatgggaggtgcagcttattcatgagcgacttgtttttagaattaaatggaaaagtgcattcgcttagtgagacatttccaggtctttctgtacaagaagtttccagacaaagtccccagttaagcatggaaactgctgaaatcgctgggactgatggggttatcccgggaatgacccaatttaaaccgtttatcttttcagcaaaatgtaatttgcaagcacttgatattccagattatcatttggcagtcagagaaatttatgaatttttattccagcgcgatagttattatatttggagcgatcaaatgccaggaattcggtatgaggtgcatcctaaaccagttgattttagtcgagaatcggatcgtgttggtttactcactatagaatttgatgtatttaaaggctatgcggagtcacgtggcacgagccttgaccctatgacttttgaagtggatttatggcaaatgggaatgaatttatcgaaccgtgatgatttattttatatttttaaagaaaatacatttcgggtctataatgcggggagcgaccgtgttaatccactgatgcgacatgaattagatattgcgatgacggcgaatgggacaccaacgattcataatcttacaacgggagaatccttcgagtatcggaaagcgctccaaaaaacagatgttttactgttgaacaatatttatccacttgttaataaccgccgtgttggaaaagataccaatcatgggattatcacccttgaaaaaggctggaacgattttgaaatcaaaggtgtaacggatgtaacgattgcttttaattttccgttcatttatcggtaggtgatagatatggattatgtgattattcaaagtatggacaaagaagtggaagagattctaacagacattgattacggctccttttcctacgattatgaaaaaaatacaagtcgtgctatctcgtttactgtgaacaaaacgaaacagaatgcagcaatttttgacttggtaggaaatgaagcaattttaacatatcaagggcagcaatttgttattaaaaaatgtacgccaaaatctattggaggaacaatttcaaagcagattacggcccagcatatttgttatacagtgcaagatcatgtgcagtataacgtgaaatctggacgaaaaaaatattcgattcaaacggtattggaatttgcgttacaagataatgtactaggattttcttatgaaattcaagggagttttcctttagttgaact

SEQ ID NO: 3847 - DNA, 4565 bp, Listeria monocytogenes 4b
  misc_feature (1)..(end): n can be any nucleotide: a,g,c or t/u
ccccgatccccccatccatgtcccatccccaccggccccaccatctttccaataagcaccctccagcattatcaatgaccttattcgcttcccaaatgtggccccgcctgggcattcttttccttctcaccacttgaagtcgaccaagccatctatatcgcaacaagcgcaattactatccgttgaaaaaaatcatctatatagcaaaatgatgttaaaacatactgctttagttccgaaagatttagaagcccgcgcacaaaaaacaagtacagaaacatttgaaattttaacagaaatcgaactttttgacggtgaagaattcgtccgtgttcgccatactattgacaataaagtaaaagaccaccgcattagagcattgatcaaaacaaatgtagcagaacctaaatattcttacgcagaccaaggttatagcctcatgaaacgcagcgtcataaacccttaccttgcaaattggcgcgaggacaaattcgtggaagcacctgtgccgattttcccagtggaaaatatcgtcgctgtttctgaagaagacgcaacacttgccttgttagttggcggtatcaaagaatatgaaatcttaccgaaaactgctgaaatcgcattaactcttttcagaagtaatggtttgcttggaaaagatgatctcatgtggcgtccaggtcgtgcttccggtattaataccacagtcgttcntacaccagacggtcaaatgctcgaagaaatgatttttgaatatgctgtgtacgtacaacctgagaaactaaatgaacaaacgctctacgcgcaatctaacatttttgaaggtcatacagaaacctatcacttacaaaacctaaatacatttgaagagcgcctagaacgttttgaagtagattatccaatcgaccgtttaccagctcaaaattctatctttgaattagataacccgaacgtattcatgagcacttgcaaaaaatcgtgggatggcactggcacaattatccgcctatttaacccatcagacaaagaagaaaccgttcgctggacaaccaacgcttccagttttgaagtttcactagcggaggaaaaaatcgcagaactaaaagaaaacactatctgtattcctaaaaaaggatttgcaactattttgttggaaggagaataatatgcaaaccgaactggttaatcaaatagaagtaaaactaagaaaaatttatcaagctgcataccaacccgcatacttggaaaaaatgctcgcatgcgccgaaaactattctaataatgcgcgtggttcgattgatactatttcccaaaaaaacgtatatcttattgcctatggcgacagaattgaaaaagaaaacaagcgatacgctgcaaacattcgtatgaatcacgtacaagataatagcgcgaggaggttatctacagcatgtccactctgctgctcgatcgttccctatgggcgtaaagatgactggctctctcttgtcacaggactagctagcaaacacgactaacatgcttgtgggactgcggatgcacggtcaaaaaatagccagacaacttcctagtgatgcttgatttcgtagccaatcatatgtcgaaatcaagtgattggtttaagcgattctccgataacgaagcgccgtacaatcaatttttcatcgagaaggacagccaatttgattataaaaacgtcacacgtccgcggacttctccgctgttccacaaatacgaaaacggtaaagaactttggactacttttagcgaagatcagttagacttaaatgtccgtaatatcgattgccttgtagccttaacagatgtactgcttttctatgcatccaaacaagcgacaagcattcgacttgatgccattggatttttatggaaaacttctggcactacttgtatgcacctgccagaaacccatgagatcatcacgctttggcgtctgctgattgatgaactatatccaaatctgcaaattatcacagaaacaaacgtccctcatgaagaaaacattagttattttggcgatggtgaaaatgaagcaaatatggtttatcagttcccgcttccgccacttgtgctccataccttcacttgccatgatacaacgaaactttcgaagtgggcgaaatccatttcacaagtttctagcacagcgacttattttaacttcttagcaagtcatgacggaattggtatgcgccctgcgaccggaattctttccgacgaagaaatcaattctctcgtccaaaaagcggtccaaaacggtggccaagtttcctataaagacaacgcagatggcacgcagtcggtatacgaacttaatattaactacggtgaagccctgcaaaacccgggcgaagacacaactgaagaactcgtaacgaaaaaaattatcgctgctcatagtattttgctaacacttcaaggcgtcccagcgatttactatcattcccttctaggttctaaaaacgaccttgttggttacgaagaatccggtattaatcgccgcatcaatcgtgaaaaactggaaaaaaatcaattggttcatgaacttgaaacagacacttatcgccaaaccattttcacatcgctgaaaaaattggtgcaaatcagacgaaatcacaccgctttttcaccatttgcaacccaagaaattttagatttaggaccagatgtttttgcgataaaacgggaatctgaggaagaatgtatttacggaattatcaacgtcacttctcataatatccgcaaaacgctcgctttctctggcacgaatctattaaccaatcaacccgttacgagtgaacttgatttaactgcgtatgaagttgtctggattaagaaggcggtccaatgaaaatcgtcatcgcacctgattcattcaaagagagcgccactgctgttgaagtagcaaatgccataaaaaaaggctggactaaagcacgtccagccgatcaaattagccttgcccctgtttctgacgggggtgagggttttcttactgttttaagtgagtcttccgaggtggaattgtttcaagcagaagtaaccaacctaaatggtcacaaaataacggcctcctacggtattctcgctagccaagaaactgcaattatcgagtccgctaacacgattggattagatttaatcccagccgtagaccgcaatccagcttacgcgagctctaaaggcgtcggtgaacttattttggcggcactgaatcacaacgtcaaaaaaatcattatcggccttggtggaagtggcacaaacgatggcggcgctgggctaatccaagctttgggcgttgcactacttgataaaaacaaacagcctattccgcccggtggcattcatttgcaagaactagcttacattgatgccagcaaccttaatccaaagctgaaaaacattcaattccaaatagcctgcgacgtcacgaatccacttcttggagaaaacggcgctaccttcgttttcggtgctcaaaaaggcgcaactcccgaaatgctcgttcaactagagcgcgccatgcagaactacggagcaaaactcgatcaattttcatctcaaaaaatcactacaaaaaaaggagccggagccgctggtggtatcgctgccggactaatgactttcctaaatgcagacgtgttaagcggttcagctctagttatggaactttctaatatgaaggataaaatgaaagatgcggatatcgttattgttggtgaaggacgaatggacaagcaatcgatgatggggaaaatccctgttcaaattgctcaagaagctaaaaaacaaggttgtttcgtcctagcaatcgtcggtagccttgcactcgaaaacaatatcgcccaacaacacggtatcgatgcgtttttcccaaacatcccagaaataacagatttacccactcttttcgaaaatacaacaaagaacctcgaacgcacggcggaaaacattgccaaactaactttaattggcaaataattttttaaactgttttccttctaatcaattcatgctccactttaattctttgcaatttaccttgttcaaaaatagtaaaagcattttctcccaatttttttaggttatgatcaagcgttgtgatttctaaaaccttaccaattgggagattttcttgccctaaaatagcgacatcttccggaacacgcaagccgagttttttcacgtgatacataacccctgccgcaacctcgtcaccattcgcataaatcgcatcaggccagtctttcccctctgcaaaaaaatgctccccagccttcaaaccatcttcaagcgtataacattcacttagaaaccgattatcacccactgaaccaaaaacttgctcataagcattgatttttccatatgtactcgtactttcacgcgatgctctccccgctgtaaaagccacttttttataaccttcatcttccaaaaactgaaatccagccccgtatgctttcacgcggtcaatatagagccnatacctctttgattcacatactcgacgcatatcgtcatacctggacggaaatacgtca

SEQ ID NO: 3848 - DNA, 5168 bp, Listeria monocytogenes 4b
  misc_feature (1)..(end): n can be any nucleotide: a,g,c or t/u
tccccgcccgcttcctcttgaatcaaggatgtttgcacatgatgcgcttctcttaaagattgatttgcttgttcaatacatgcttctgcttccgcaaattcacttttttctgcgtgacgaattgcttttagaaacgaggaagaggcatctcctgcacttgatattattttaaatgactgtaattcagtgccttccattagtttccctccgtcttaaatgtattcgttccagcttctttaatctttttaaatgcagcgattagaattggtactgcattcatgttgccataatcttctttatcaataacttcgactggaacatttaatccatgttcttttgtcgcttcgattacctgttcataagccattgagagttgagggccaagtaagacaatagaaacattatctagatgatcagaaaactcatctttcccccaagcttcaatcgtaattcctttatctttaaatttctcagatgccgcaatcgcctcttccatcttttttactaaaatggaagtggataatccgccaaaacatactaacataattttcatgtctatcgtcctttcctacttaaaaatcaaaatcatctaaactagcttcttggtctccactcgtttcttgtaaaatagcttctttttcagcaattttaaagaatggatagtaaataagggccgaacagaccaagataagaccaagtacaataacatatctccagtcaaatgaagcgacaatagcaccgattggaacaggtacatatggagaaaccatcgtaaatggattcattaatccaagcttgatagagaaccaaccaatcaaagcagcaatttgcggtgcaagcatcatcggaataaagaagcgtggatttaacacaattggaacaccaaacattactggctcattaatactaaagaaggttggaattaaagcaagtctaccaagtgttttatatcgttttgatttggagaacatcataatgacaacgagtgctcctgtaaccccagccccagttacacctacaatactccacataaagtcaggagtgaaaatcagcatagaagaaagtggttctccttttgcaagagctgctgcattcgcatccacgttttggaacgctacactgagccaaactggcgccataacagaatagccatgaataccaaaccaccataataattgttggataaagataattaacataatacctggtaatgtgtttactagggatgtcagtggagaaaatagtgtttgaattaactcaactacacgaataccacttaatgtttctatcccaaaacttaaaatagcaataattaaaacagagaataaaattggccataaattttcaaaagaacgtaaaatcggcgttggaacaccttgtcctaaattaatcgtgaatttcaacttattcttaaaaatgtgtaaaatttcgacagacaataaactaattactaaagcaacaaaaatcccttcaccggctagatacgctacatcgctcccgcctgattcaagtggtcttactgcaacgacaacaaaactcattaaggctgttacaatcgccccgatatcccataaattgcgttccttcgcatagtaatatgctacaaaaaccgccacatatacggacattaatccaaaagtggcaaaatatattggagaagtgatgttattgatataattggaaaccgctgcaatccaactaggtagtttcggaatcccgcctagctgttggaataaaacgggaactgcaccaactaaagtaattggtacaagtgccatcattccttgacgtactgccttcatctgggtgttactttctagtacttttgcaaatggtaataaccattttgacagaaatcgttctaatgctttcattgattttcatttcctttccctaagctgttatacgttcatgatagcgcatacaaaattcaccctcaattaatcttatttcctaagcataggaaattgtcactttaccttttttatacaaaaaacccctataaagtaattgctactttataggggttttatttgtttagttttctaaagccattaatttttgattatcatcaagagctgactcatgtgcatcatggcgttttttcaagtggctcatagatagatatagtaagccaacacatgcgatcatgatgattgtaagaacgagcatcgacatactgtatacatttggtcccatacctgctgccagtgactctctaaacgcataaatcgagtaagtcattggtaagaacggatggattaaattgaagaaccatccagtaagtggcattgggaatgttccgcctgatcccgctaattgaacaatgagtaataccatcgcgataaaacgacctggattatcaaatgtcatggcaaggagcatgataaggaacatgtaagcaagtgccgtaataatcgctgttccgaagaattcaacaatgctatctggtcttagtcctagtgctatcatgataccaccttcaagaagcgccatcgcaacagctgcgacaaaaccaagtgatagtttacttaaccaccatttataagctggttgtccttccatcgaaacacgtctgattggcatgatgaagttaaatacaagtgcaccaacatatagagctagtgataacacatatggtgctaatgcatgtccgtagttacttacgtgcgtatattcattatgtgcgagttttgttggagcagcaatcatgttaaatgttttgtctgttgcttttgtatctttgacttgttgtgctccgtctgctagtttgtctgttaattctgtgctgccgtctgttaatttagtaagtccatctcctaattggaaggaaccattcgctaatttggaagaaccatcggcaattttggaagagccgtctgctagttgtcctacgcctgaaactagttttggtgagttagctgatagttggtttagaccgcctgctaattggcttgaacctgcttgtagttgattaactccacctgcaagtgttggtacttttgcagctaattggtttgttccgccttgtaactctgttgcgcctgaacgtaatgcgccggaattacttgcaagttgattaccaccatcatttaactgacttaatccgttttccatatttgcactacccgcagcgagttgtcctacgccagaagttagggttggcacttggctgttaagttgatttgttccagcaactaatttggcatttccagcttgtgctgatttgagtccagcagttagttggttcgcgccgccaagtagagtttgactacctgagccattaattgcttggtgaatactgttaaaggcttcgtttgttccaccgtgaactgcttgataaccagcggaaattttcgctacgccagtttgcaattctgttacttgtgtttgaattgccgctaaatcaagacctgataagccgctttgtagttgttctactgttgctacttgtgtagcggatttttgtgtttctttatctaaatcggcttgaatagcatcaataattttttgtttatcttctgcactcacgccagctgtcgcattaatttttgatttaattgcttcagcatcgaagttcgcattagatttaataaatgttaagccattttgtaggtcgcttaaacttttttgtagtgcagcgagttgttttgcaagtgctgcatcttccccgttgacacttttatttaattgatcaattccttgttgtaaatcgttcatgccttgtttcaattgggcaattttgccttgtttatcagttaaattaccgtctaattctttaagtcctgctgaaagtttgttacttccatcgactagtgaatctaagccagttgctaagcttttttgaccgttgtttagttgtgttatgcccgatgctaaagttggtacactgccattcatcttatttaatccatctgaaagtgcagtagaaccagtgtaagcttggttaattccgcctgctagtgtatctacaccagatgtataggtagaaactccgctagctaatttcgttgccccgccgtcaagcgctgctacaccgtcttttagtggtcctactccagctgcaagtgtcgaaacaccatcatttaatttatccccaccagcggccgcagtgtttacaccatctgtgtaagttttcaagccaacttctaacgtattagcgccatctttgaacgttaaagagctatctgcgagcgtttttaaattagtagaaatcgttttattaccttcttgtgatttcacaaggccatctttaatttttccagagccatctgcagcttgggcgaacccttcaccagactctttaattttatcaaaaattgcttccgcgtatgattttgttacttcagcggaaacctcgcttttcagttgtttggctccttgttcactcacgacttgacctaaatagttcagcgagccgtttgttttataggataattccatttttttcggatctttatctaaaacggatgctgcatttttagagaaatcttttggaatcgtgacaatcatataatatttgccatcttttaagccttgttccgcatcttctttggaaagaaaattccaatcaagttctttgttgcttttcagttttgtgactaactgatcaccaacatccattgtttggccgttataatcaaccggtttatcattgttaactaccgctactggtaaatcccctgttttgccgtacggatcccagacggattttaagaaaaagcttgcatataaaagtggaataaacagaataactacaaatgataaaagtagtattttgtttttaaataatttcttccactcattttttaccatatccattttattaccgcacttctttcttttaaagatttattacgcttcgttccaatctatgatagtggttcgttctttcccaataacttgctctactaaaacagataatttttgtgagtataaataattagcgtattctttatcagcgtttctaaaagcacttgtaatggtgtgaataccggactctgcaaattcatgatagtcagagaaaacagtgtggattaagtcggaatctgggtatgtatcgattttcccttccactgcttctacaatatccagcaaattaatttcttcagggtctttagcaagcgtgaaaccaccgttattacccgaaactgaattaatcagcccgc

SEQ ID NO: 3849 - DNA, 5396 bp, Listeria monocytogenes 4b
  misc_feature (1)..(end): n can be any nucleotide: a,g,c or t/u
atctaagccaccatcgccacccataatgtaagtaactacggcagcatgatcttttttcgctagtttattcgttaatgttttagtcatttatttgtccctccaagcgttcctttagttgattaacatctttatctccgcgaccagataaacaaacgaccatactttcttctggacgcatttggcttgcaagtttgactgcataactaatcgcgtgcgagctttcgagtgcaggaatgattccttccgtacgacataaaagttgaaatgcttcaacggcttcatcatcggtaacagaatggtacgctgcacgacctaaatcacggaaaaagctatgctccggaccaatacctggataatctaagccagctgaaatcgaaaatgcttccaaaatttgtccattctcatcttgtaaaacgtccatcatcgctccgtgtaaaatccctatttctcctttggaaatagtcgctgcatggaattcagtttctaaaccgtgtcccgctgcttccacaccgtgcatttgaacagaaacatcatctacaaatggataaaataaccccatcgcattactcccgcctccaacacaagcaacaattgcatcaggaagcttaccttctttttccaagtgttgtttgcgtgcttctattcctatcacactttggtaatcacgaacaatttctggaaatggatgcggtccaagaacggatcccataatgtaatgcgtgtcttccacattagcaacccagaatctgagcgcctcatttactgcgtcttttaatgttctgcttcctgctttcacgctcactacttttgcaccaagaagttccattctaaacacattgagtgattggcgtttcacatcttcttctcccataaaaatagtacattccatattaaaaagtgctgcaacagttgcagtcgccaccccgtgttgtcctgcgccagtttctgccactactttttgtttacccatttgacgtgcgagtaaggcttgcccaatagtattattgattttatgtgcgccagtatgatttaaatcttcgcgttttaaataaatttttgctccgcccgcatgtgctgttaattgttcagcaaaataaagtggtgtttctcggcccacatattcttttaaataatagtttaattctttttgaaaagcaggatctgttttggaagcccggtacgcctcgtctaattctttcactgctttcattaatgtttctggtacaaatctgccgacaaattttccgtaaaagccattttcgtcaggtgcttgataagtcattattattccactccttttgctgttttaatgaagcatttaattttctccggatctttttctccgtttgtttctacgccagaggaaatatctactgcatatggttcaaagcgtttaatggcttcttgtacattctgagcatttaatccgccagctataattaatttgttttttgtaagcatgtctctatttattttatcccaatcaaatgtttttccgctgccgccttcatattcctctgctggcgcatcaagtaaaatataagcgtttggatagtcatttatattggtaggaagtttcccatctttcacaggaaaagctttgattacttctgcatctgtgcgatttgcttgttttgcgggttcttgtccgtgaagttgaacaatgtctaatggcacacctttgattgctgcctttaactcttcttcagtgggattaacgaataccccgacttttttgacgttagcgggaatatttttagctaattcatgtgccttttccaccgtaacttggcgtttactttttgcgaaaacgaagccaatcatatctgcgccattatcgaccgcagccgctacatctactgcttttttcaatccacaaatttttacaatcatcgtgtcaccttcaaacttttcgccgctgcttctggagtcgcttctcgcattagcgcttctccaacaagtactgcattatatttttgactaacccgagccacatcttcagctgttcgaaaacctgattcacttatgaaacaagcatccgacgagaaatcgctcgccagtctttcacttactgcaatatccacttcaaatgtatgcaaattacggttgttcacaccaatgagtttagctccaattttttgagcaacagctaattctttctggtcatgtacttccactaacacttccaaatcaagcgccagagcttgttcaaacagagcaattagcatctcttctgtaagtgccgaaataattagcaatacaaccgttgctcccgcatttcgagcacgaatcaattgtttttcactaataataaaatctttacatagtacaggaatttcgacatttttcgctacttctcgcaaatcttcaatcgagcctttgaaaaaaacaggatctgtcaaaacagaaatcattcctgcacccgcagcttgataagacttggcttgcagaaccggattcacgcccatattgatttcccctttagaaggagaggcgcgttttacttctgcaataagttgcatcgtgctggtatttgcttttaaaaattcataaaacgaataagttttccgtttttcggctactttttctaagggcatgtctgcaacttctactgctttttgcgctaaaatttcttctaaaaatgtcattttgctagcacctctttttgataagtaattaaatctgccaatttttgtttggctaaaccacttctaattaaatctcttgctaaatccacgccttcttgtaccgttgtcactttgccatttgcaaataaaccaaatccggcatttaaaagcactgtatctaagtaagctcctggttctccgtcaagcacactacgcaaaattgctgcattttctttagcttctccgcctgtaattgcttcgagaggatagctagttaaaccaacatcttccggacgcagtgtatataagtgaacttcaccattttcatataacgcataatgattttctccagccagagaagcttcatccataaaaccagcgccatttaaaacaactgcgcgttttcgtccgagctggccgagtacttccgctgtttgctctaacaaatcacgacgataaattcccattaattgcgtttctaaatggaccggatttgtgagtgggccaatcaaattaaatatcgttggcgttccaagttcttttcgaacatccataacgtacttcatattcgggtgaacatgtggcgcgaacaaaaaggcaatcccgactttttcgagtaaataagtcatatcttctgggcgcatattaatatcaatccctaattcctgacaaacatcagcactacctgaacgactagaaatacttctattcccatgtttcgcaaccggaatccccgcagccgcaagaacaaaagccgacgtagtactaatattaaaactattggatttatctccacctgttccgcaattatccatcgctgtcccggctggaaaagccacttgaatagccactcgttgcatcgcctgcgcgattcccgccatttcttctgccgtttctcctttcactttgagcgccattaaaaaagcagctattttcgttttcgaaagtcgtccttcaaaaatttctgttgcgatcattgtcatttcttctttggataaattttcttggtcatatactttttgtagtaagatttccattttctcgcgctccttccactatatgaataaagttttccatcatttgttttccatcattcgtaccaattgattcaggatgaaattgcaaaccgtaaaccggataatcttttactttcattgccatcacttccgcatcgtccgtcgctactgctaacacttccaaaacttgtggcaacgtgtttttatctactattaaagaatgataacgcatcacaggcatttcttccggtaaattagcaaagattgctccagcggtttgccgcatagtagaaactttcccgtggcggattttcgccgctctttttacgtctccgccgaatacctcaccaatcgcctgatgacctaaacaaattccaagcaaaggcttttctttcgcaaattttgcaactacttcttctaaaagaccagcatcacttggttttcctggtcccggtgaaagaactatcccatcagctaaagccgccatttccattaaatcagtcgcatcattccgtttcacaaccacttcactaaattctgctaaatactgttctaaattaaatgtaaaagaatcgtaattatcaattaatagaatcattctcccacctccaaaagtgcctttgctttttgtaatgtttctaagtattcgctttctggatcggaatcatagacaattcctgcaccagcttgaacataagcttttccgttatgaagtaccattgttctaatagaaagcgcgaaatccgaatcaccatttttagttaaataaccaaccgcaccagcatatgggccacgttttacattttcccattcatagattcgctccatggctcttattttcggtgctccgctaactgtaccagccggaagcgtcgaccgaagagcatccattgcagtaagtccgggttttaaggttccttctactactgaaactaaatgcattaagaaacggtatctttcaatagtaaggtaaacaggcacatgcaccgatccagtttcggcgattttcccaatatcatttcgtccaagatctactaacatccggtgctctgccaattctttttcatccgctaacaattccgaagcaagtaattcatcttcttgtttcgttgccccgcgccgtcttgttcctgcaataggattcgtaattaccgtccgccctttcgttttaatcaaactttctggcgaagagccaattagcactgtatccccaaaatcaatgaaataaagataaggagaaggatttaataaacgtaatttccgataataatcaaatggtgtcacggtgaaatctgcttctagtcgttgcgagagaacaatttgaaagaagtcaccctcttggatataggtttttgcttttttcactaaccccatgtactcctctttcgtgtagttactcttgtatgtcattttgggaacatggacagccttgtgctcttcctttttcggcgttgtaagttcagtaaacattaattcaagcgccttatctagttccgcctcacttcttcccgaatagcaattatcttgcactaaaataagttcttccgcctgatgatccataatcacaaaactttcatatacataaaaacgaatatctggcatatcccgagtttctactggaatttcgcctaaattctcataaagcgcaatgacatcataaccaacataaccaattgcacctgaatcaagcggtaaatctgcttcatcttcttttgctttttcgataaataattcaatttcttttaaaggatct

SEQ ID NO: 3850 - DNA, 5721 bp, Listeria monocytogenes 4b
  misc_feature (1)..(end): n can be any nucleotide: a,g,c or t/u
agcgtcattaacttaggaaccttgacactcccgggtacagcaatcatcccaaggtcgttccgtagtaaatcgacaatcatcacattttctgcacggtttttaggatcgttttttagccaatcatgtgcttctaagtccgcttgctccgttattccgcggcgaatagtacctttcatcgggcgtgtcgttagaagattttccttccatttaaaaaagagctcgggtgaagccgagataatctcaaagtcactggttgaaagtagggcggtgtaattcgcctttccaatctgctgtaacgtttcataagtcgcttgagaagaaaagctgtttggcacatcactttgaagtcgcacggtgtagtttatttggtaagtatttccagctgcaatttcagctttgatttgctctattttctcggcgtattcagggaaactagtattcattttaaaagagagcggcgaggaatctggtgtttcggtagctgtatcgttaaaattatcgtatacgccaaaccagacgaggggcatgtttccgctcggtttttttgtttttaaattacttcgaaaagcaggcgcggcctcataactgacaaaaccggcgacgtattttcctgatttttgggcttcttcggctgctttcattataggaagaacttctgctaaatcatgcgtaactagttcatacagtggattttcaaaaatttttgtgtcgccttcaaaatcaaatcgtaataagctcatttaacatttctccctaatcgtataaagttttcaagtattgcatgtccgttttcagataggattgcttctgggtggaactggacgctgtgaatcggttttgatacgtgagctagtcccattataacgccgtcttctgtcagtgcggttacttttaaattagcgggaactgtggcaggatcaataactaaagaatggtagcgcgttacttggaactttggtgcaagctctgcaaacaacccttccccagtatgcgaaatgatacttgtttttccgtgaaccgggacttttgccggcaccacttttgccccgaaaaaatgagcaatcatttgatgaccgaggcaaatgccgagaataggaacttgaattttatctagtagagctaaacttacagggaagtcttccggtgaacctggccctggtgatagaactaccatttcgggaacgagttgttgaaatatttcaagcgaaaaattagtagcagaaacaacctgtacctcctcttgaagctctaaaaaatattggtataaattatatgtaaatgaatcattatggtcgatgattaaaatcactttaaatccccctagttaaaacggttatactcttttatagcaaatagctagagagataacaagcccgaatgtttaaagccgggagccgagtggaaaggtacactaaataaccaaaggaaggtgtttgagatgaaaaatgaactagaagataagattcttgccattttggaacaacatcaagtgggtgtattaacatccgtacaaggagactatcctcatgctagatatatgacgtttctgcacgatggtttaaccctttacacaccgtctggcaaagaattaccaaagacagaagaagtacgtagaaacccacatgtatccgttttaattggttacgaaagcccagggtctgcgtttttagaaattaatggtttggcttctcttgaagaagatgaatcaatcaaagaacgcatttgggaaaacatttctaaagaatggttccaaggcgaagattcaccgtcctttgtcgttataaaaattgtacctgaacaaattagaatattgaattctgatgatgacggtccagacacgctcgatttaatcggttaaagatttgcttgtaatttaagcagatatgcgatagaataactttaaattaatacgaaaagcgaagacaagaagtagtaatgaggcagaatttctaaagagagccagtgggtggtgtgaactggtgaagtgaggaatgaatccatcttggagtgagtggtggaaagcataattttgcgagtaaatcattccggttgggtccgttaaacctaaatgaagctggggattttttgaagtcccaataagggtggcaacgcggttaactctcgtccctttcctgttaattcgggaaagtacgggagtttttatatggaaaaaataaaggaggagttagcatgttagatgttaaattgttacgtaataattttgatgaagtaaagcagaaattacaaaatcgcggggaagaccttggtgaattcgagaaatttggtgagttagataaacgtcgccgtacgctaatcgtggagacagaagcgctgaaaagtcagcgtaatgaagtgtctcaagaaatcgctaaattaaaacgcgaaaaacaagacgcagatgctaaaattgaagagatgcgtgtcgttggtgatcgtattaaaacattagacatcgagctaagagaaatcgacgagaagttagatatgattttaatgtcgattccaaatattccgcatgagtctactccggttggtgaatcggaagacgataacgtggaaattcgcaagtggggcgaagtacgcgaatttgattttgaaccaaaagctcactgggacttaggaacagacttagatattcttgattttgaaaatgctgcgaaagtaactggtagccgttttgtctttcataaaaaattaggtgcaagactggagcgggcgctaattaactttatgatggacttgcactcgaatgaacatggctatgaagaaatgttaccaccgtacatggtgaaccgtgcgagcatgactggaactggtcaattgccgaaatttgaagaagatgctttcttaattgaagcagaagattatttccttattccaacagcggaagtaccagtaacaaactaccaccgcgaagacattttaaaagcagaagatttaccaagaaaatatacagcatttagcgcatgtttccgttctgaagcgggatctgctggtcgtgatacgcgcggcttaattcgccagcatcaatttaacaaagtggaattagttcaatttgttaaaccagaagattcctacgcggcgcttgaaaaattaactggaaacgcagaagaagtattgcgtcgcctagaattaccatatcgcgtattaagcatgtgtacggctgatttaggcttcactgctgctaaaaaatatgatttagaagtttggattccaagctataattcttaccgtgagatttcttcttgcagtaattttgaaagcttccaagcaagacgcgctaacattcgtttccgccgtgaaccagggagcaaaccggaatacgtgcatacattaaatggttccgggttagcactaggtcgtacagtcgctgctattttggaaaactaccaagatgcagatggttctgtacgcattccgaaagtattgcaaggctacatgggcggtatcgagaaaatagaattaccaaaataatatggaagaaggaactgtaatggcgaaccttagcgaattaccaaacattggcaaagtactggagcaggatttaatcaaagcgggaataaaaactcccgtcgagctaaaagatgttggaagcaaagaagcctttttacgtatttgggaaaatgattcaagcgtttgtctaagtgaactatatgcgcttgagggagccgttcaaggcatcaggtggcatggtttagacgaagcaaagaaaatcgaactcaaaaagtttcatcaatccttatagaaaaagcgacgatgcatattcgcatcgtcgtttttttatttcccgggaaatagttattttaattgttgttctgcaaaggaagcgtaaagtggatgggaagcaactaattcactatgtgtgccacgaccagttatttccccgtgttcaataaagagaatttggtcggcattgacgatagtagaaaggcgatgagcgataacaaaagtagttcgaccttccattaagtttgccaaagcttgttgaacgatttgctcggattggctatctaaactagctgtagcctcatctaacataaggatattaggattacgcaagaatgctcgagcaatggcaattcgctgtctttgaccacctgagagcttcacgccacgttcgccgacttcggttgccattttgtcaggaagttcggaaataaagccgtcagcataagctagttttgctacattccatagctcatcttccgtaatttctcggtccaaaccataacaaagattatcgcgaattgtaccagaaagcatcgcactttcttgggagacataaccaatttgtgttcgccaggaattgatcgaaatctcggaaaggggaatatcgcctactaaaatttctcccgttttcggttgataaaaacgctctaaaatcgcaaataaggttgatttacctccaccgcttggaccagcgaatgcgataacttctccgggttttgtatcaaaagaaacatgttttagaataggctcaccttcattataggagaaggaaatatcagacgcgcgaatggtttttccgctcacatctacttttttaccagcgtcaaaatcttcttctgtttcattcaaaatatccgcaattcgttctgttgcgccttttgctttttgaagttgggcgaagaatgttgcgaaagaagtgacaggaacgataatttggaacagatagagcaaaaaggcgatgagggtaccagtagtcatcgttccagctgaaacacgaatcccaccgtaaccgatgatgccaacgataacccccatgacaacaaagaaaattagcggtccaagcacagcaacaactttcgcctcacgaataccaaagccaaataggcgattaattccttgatggccagcctcggtttctagtgtttccgcattcgaagcctttacgagcctagcttctgatagcgtttggctaatggaaccagtgaagtcagccgtttcattttgaagacctttagatattttaaacattttctgaccaagtggtgcaacaactagcgcagtaatcggaacggccactaaaataatgagtgtcattttccagtccatgaagaacaaaataataatcgccccgacaacagaaattatccccgttacaaattgcggaaaatggtcggcaatcagctccttcactaccactgtatcatttaccatgcgacttaccatttccccagtctttgtattatcaaagtaagaaaccggtaaatgcacaattttcttccataaacgttcgcgaatcgttgcaacgactttctgacccatgtagttaagtaagaaaatcgagaagccattcgttatagcttgtaaaacaaatgccaacacaattaaagcaatcatttttacatcgagtgaagctattgaaaagccatcaattaagttctttgtaaaaagtggcacaacaaggccggcaactgtagttatcacactggcaaataaagcgcagaaaattatccaattcgcaggttttgcgctaataagtaattggaaaaattttcgccaactatattttttctgatccattcatttcacccttcctgagttacccatccataaattacttactttttaagtataatcaatttatctaaaaataaaccagtctaaagtggtagttattgaattattatctgactttaaatatttaataaaagtaacaaaaagttcgaatttaggataaaacactaacgaaaaacgagatataaattaagtatttca

SEQ ID NO: 3851 - DNA, 6743 bp, Listeria monocytogenes 4b
  misc_feature (1)..(end): n can be any nucleotide: a,g,c or t/u
actaagatacttttagctagtaatctaatatttttttctattgcaaactgccaattagaaaccattagaaatcgataaaatttggcgataataccttttccactactttcgacgagatgattgatcaaaattaatatcgctgtatttagaataagcccctgtgacacagtgatagccttcagcaaaaactggacaaagccgtgtaacatgagataatagaaaaaaagaattttgttaggggcgaataaaatgaagaaaatcggctttattggcgcaggtaatatgggaactgcgatgattcggggcttagcacaagcgaatttagataacagcgaagcaatcattgttggtggtcgaaatctcgaaaaattaaaaccactggaagcggcatttactggcctgcaaataacaaccgataccgaaaaactcgtagaacaagcagatattattattttagcggtgaaaccttacactatcccagaaattttaacgtcggtaaaagagcagctaacacctgataaaattgttatttctgtagcagctggcgtaactatccaagatttagaagaactcacttccgcaaaaacaaaaattgttcgtgtgatgccaaatacaccagcgcttgtcggtgaagcaatgtcatctatttcgcctaacataaacgtatcatctgaagaaattaatgaagttacagctatttttactagttttggagaagcggaagttgtttccgagaatttgatggatgcagttattggcgtcagtggttcttcaccagcttatgtttatatgttcatagaagctttagcagacggcgccgtcctaagtggcatgcctcgcgataaagcatataaattcgccgcacaagctgtgctaggtgccgcaaaaacggttctagaaaccggcgaacatccaggtaaacttaaagatatggttacttctcccggcggaactacaattgaagccgtgaaatcactagaaaatgatggtttccgttccgctgttatcaatgcagttcaagctgctgcaaagaaaaatagttcgatgtaattctataaatatttaataaaaaagtacttttcttctcctattataggaaaatcttttacacgtccaagctcagtaaaaccgcattttttataaaatcctggggcttggtaactaaatgttgttaaggagatatggtggcagttatttgctctaccatatctttctatttgggccatcaattctgtacccacgcccgatccttgtgtgcttggatcaacagaaagaagagacacatataattctccgtagctgattttcgctgtaactcctcaaactatttcccctacttcacttaaagccgcaaagccaatatactctgtgtctttttttggaatgtcataacctaatctttctttatgttccaaaagcccctctactactttaggttctagttcttccagtggcatttcttttattttatattgcatccctaactcctccttcatacaaaaaagcatcactaaaaagtgacgctcagtaaaattattttaaatttgctactcgtccatatccagcaatatattttttccaatagccagatgtgattgtgtcgtattttacgccattattttgcgcattaagcattttgccatttccaacataaatcccaacatgtgcaacacccttaccataattgaagaaaatcaaatcacctttttttagttcttgagctttaattttcttagcagaggcatattgttgcttcgctgtacgaggaatggattttttaactcctttagagtatacatattgtgtgtaacctgaacaatcaaaacagcttgggccagtagcgccaattttgtagcgtttgccaatgtgttttcttgcttcgttatttaatgcggtaaaactttgcgttgttgcaacaggtgctttatatgtagtcacacatttacctgaaacataaccaactttgcctttgtatgtcgttttataccagttgttttttgttttagcagtgaaagtaaccgttgtaccctttttgtaaaaaccgatgactttacctttggtgttgtctgctgcgcgaacatttacatcagccgttgtcgtcattttatatgtagtcgctgctgaagcgttagttgttggtaaaaatagtactgaaaaagaaatcattaaagctataaacgcaaaaaaaatctttcttctcgttgctattattttcaatccacgcaccccttttttatatacacacagcatagcaggtcaatgttacagttgtaatacagggattttaaaacttggcgttattatgtaacagttttgacacagaaacaaaaaacccaagaaactagttcttgggtttgcttttatagatgatttttccgtaaagaaacgggcttatcaaggatttctttcgtaattatcgcttcttgtaatcttccgcgcaatttacgcgcttttttgtgatgactactagtgcttttaatgatgtttttcccttttgccacatccgattctcggcggatttctcttagcattttttgttgtgctgctttttgttcagcaattactttgtcttgttctttattttgtgtgaatgtcccttgtgacactttgcgtttttctggtttcttagtggtttgcgtacggcttgcttggtgcattgaacgcaaatttggtctaggttgtggcgctttcttattttcctcttctgtgcctttaccggccttgctaaggaaatttataatgacaccaacaataccaaggacaactagaacactttcccaaccactatttagaaaatcacttaaatccattgaaaacaccttctttcttgcaaaagatcaaggtttatttttcgtcttcgtgtgcaatcgattcgcgcatagctgtatctgattgtacattttccattttgtaataatccattacaccaaggttaccttcttctaaagcgcgagatagcgcacgtggtacttctgcttctgcggctacaaccgctgctctgttttcttgttctagggcaatcgcttctgctttacgtttcgatgcagctgcttgagcaacttccatgtccgcgttggctttttcgatgtctagttttgctttaatgttgtcaccaatacgcatttcagcgatatcaatggataaaatagtgtaagcagttccgtctccaagtccttgttcttggacttttttcgaaatgctgtttggattttcaagtacatctgtatgttctctcgtttcaccgactgtagaaactacggcttcaccgacacgagcgataactgtatcttccccagcaccaccgacgatacgttcaatattggattgtacggtaatttgcgtaataacttttacttctaccccgttttgtgccacaccagtaaattcaggtgtacggataacttttggtgttacggaagtttgtactgcttcaagtacgtcacgtccagcaaggtcaattgctgctgcacggctgaaatctaattcaatatttgcgcggtgtgcggcgattaacgcatctactgtgttatccacgtccccacctgctaaatagtgactttcaagttggtttacttctaaatcaagtccagcttttactgctttaattaacggttttacaacgcgagaaggtacaacccgacgcaatctcattccgattaaagttcctagtcctactggtacacgtgcggataatgcactaatccataaccccactggtactaaagtgaaaaatacgattaaaaagatgataatcaatactgcgataataataggtccaatcattgtcatttttctccctcctgtatatcttcattgactagtacgtatccgaaatcgatacctactgcaattattggttttccaacttccaaataacctgttttcaagcgagcttcatagacttctccgtctattctgacactacctatcggcttaagtgtcgtttgtgctacgccttttttacccactactttgtctcgtagcgctttcattctttctacttctttgtcctctaaaaccccccgatgcacgagtccccatgattctccataaacaaagtcatcttctgtaaaattatgcttcaaactagtcaccttctttaggaacttttttaaattttactttctcctataataaccataacatgaaagaaaccttatgtaaaaagcttttaggcgaattatgtaaattttttcacttttgtaaaaaactatataatagaaaaaacaaaattttgtaataacgtatttttttactgttcgtttaagtcccaatcaattggttttcttccatgttcctcaagaaatgcattcgttttcgaaaatggtttgctttcaaaaaagcctcgactcgcggcaagcggtgatgggtgtactcctttaataagtaaatgtttcgggtttgtgatgccacttgcggcttttatagcatgattcccccataaaataaatacaagtggtttgtcgtaattatttagttcttctaaaacgtgatctgtaaatgttgcccagcctagttttttgtggctaccagctttgccttcttccacgctccaactcgtgttcattaaaagtacgccttgctctgcccatttggcaagatagccgtggtcagctggttcaatatctaagtctgtctttaattctttataaatattacgaagacttggcggaattcgcacccctttttgcacggagaagcttaggccatgcgcttgtccaggaccatgatacgggtcttgtcctaaaataacaactttcacttgatcatacggacataagcggaaacacgaaaacatatcttcttcagtcggatagacattcccctttgctctcgcgtccttaactgcttccattaattctataaaataaggctgtttcgcttcttgttttaaaaattcttcccatgtttttaccatttttaattctcccatctcagtagttccatgattttgtccttccattatacttttcacggcgagcaactgtcaaaaggcaagcggattcacgtggtatacttgaaaaaagaaataataatggggtgagattgtggcggaaagaaaagtttcttggctagaactattttttgatttaatattcgtaactgctgttgcttcaacgacgcatctgttacttagcgtcgataatcatccggataaaacagctgtttattttggcgaatatttattgatggtcacgccgatgttttgggcgtgggttgggcagacaatgtttttcaatcgcttcggtgagaaaatcaaactacccgaactttatatgttgccgcaaatgtttttcttaattttgatgacagcgagttttgatttaacgttttcaaatacgtattatacttttttaattggttatttaggtattcgcttaattacggttatccagtattttgttattagtaagcagttgacgggaaatgcgcggaaagtggcgatacttcttgggagtgtttttctactaggtgttttgacaactgcgacttcggtgttttttgaaggatttgcgcgttatttagtgatgtatcttgggattgcagttgatattattttaccgttatttttagctaaaacattgcgcaaagtgccggttgattttccacatcttgcggaacgttttggattatttgttatcatcacatttggtgaaagtattgttgcgattacgactattttagttgggcacacgcttgatccctatacgattgggtacacgttgcttggctttttaattatttgtacgctttgggcatcgtatttccatagctttgagaaaattgtcgaccaccataaagaaacccatggccagtacttaatttatggacatttctttattattatttcagtgatgttacttgcggcgaatgtgcatttgttgttcgaggggcatttggaacgcaatgttttgttattgatgttgtttggttctgtagctgtgtttttcgtttcgaaacaatttgtttttgctgctcataaaaaggccgaagtgacattttctttttggaaagatgcgttgttattgttacttctagtggggctgttttttgttaatttgtatagtgattttcctctatttgttagttttgtgagtatttgggtttgtgcgctggtggatcttggtttgcagtttgggacttcgcggtcggcacgaatgtaaataaaaaaagatgagcatttcgctcacctttcctcgcctgtgtcttggtgccttgtgtaatctgtaaaaataaataggcccattaaaaagcttattaaacatacgattgggcggaaataaaaacccgaataactcggggtgaaaatgagcccaaaaataagtccaaagagccataaaattagtgccatgaatattagaaaatcatttcgataagcacaaattattagaattcccgctaaaaccatcgcaagagacattaaatagcctgatgatgccgcaagatcttccggtatcatgaataagttattttttttactgtccggacttagtatttcagcaagagcaccaataaagcctgcttggattgacataatcccacaaaaaatacgcatttcacaccactcttttataaaaatacattttagcttattaattatggcataaaaaatctggatttactacgcgacaaagtaactaaaaatcacttaaacgcgccaaaaactagtataatttgctttatcttgaatattaaactcgatnatttttgctagtaggtcatagtgcactggtttagcccag

SEQ ID NO: 3852 - DNA, 6513 bp, Listeria monocytogenes 4b
  misc_feature (1)..(end): n can be any nucleotide: a,g,c or t/u
aaaactggtgcaacgattgctggggttactgccatcgcaacctctatcactgttcccggcatcgaagtaatcgttagcgcagacgaaacagcgcctgctgacgaagcatctaaaagcgctgaagctaacacaactaaagaaacaccagcaacggccactcctgaaaacacaacagaaccaaccgttgaagctaagcaaactgaaacaaaagaacaaacaaagacagcagaagaaaatcaagctgcagcgaagcaagtagaaaaagctccagctgaacccgcaacagttagcaatcctgacaatgcaacaagctcttctacaccagctacatacaacctattacaaaaatcagcactccgttcgggagcaactgttcaaagctttatccaaacaatccaagcctcttcttcccaaattgcagcagaaaatgacctgtacgcatctgtcatgatcgcccaagccattttagaaagcgcctatggaacgagcgaattaggctctgctccaaactataacctttttggaatcaaaggagcttacaacggccaatcttatacaaaacaaacactagaagatgatggtaaaggaaactactacacaatcacagctaaatttagaaaatatccgtcttatcaccaatccttagaagattacgcacaagtcattcgaaagggcccaagctggaacccaaattactactccaaagtttggaaaagcaacactacttcctacaaagacgcaacgaaagccttaactggaacgtacgcaacagacacagcctatgcaacgaaattaaatgacttgattagccgatataatttaacccaatatgacagtggcaaaacaactggcggaaactccggaagtactggtaacactggaaattctagcaacaccggaaacacctccaatgcaaaaatttacacagttgtaaaaggggactcactttggagaatcgctaataaccataaagtaaccgtcgcgaacctaaaagcttggaataatcttaaatctgatttcatttacccagggcaaaaacttaaagtaagtgctggttccactacatcggatacgaatacatcgaaaccgagcacaggaacaagtacatccaaaccaagtacaggcactagcacaaacgctaaagtatacacagttgtaaaaggtgactcgctttggagaatcgctaacaaccataaagtaactattgctaacctaaaatcctggaacaatctgaaatccgatttcatttatccaggtcaaaaacttaaagtaagtgccggttctacttctaacacaaatacttctaaaccgagcacaaacacgaatacatccaaaccaagcacaaatacgaacacgaacgctaaagtttatacggtagcaaaaggtgactcactttggagaatcgctaacaaccacaaagtaactattgctaacctaaaatcctggaacaacttaaaatccgatttcatttacccaggacaaaaacttaaagttagcgccggaactactacaaacacaaataccgcaaaaccaagcacaaataaaccaagtaattccacagtaaaaacatacaccgtcaaaaaaggcgactctttatgggccatttctagacaatataaaacaactgtagataatattaaagcttggaacaagttaacaagcaacatgattcatgttggacagaaattgacgattaagtgaatgtaaaaagcctacctcatgagcgagataggtcagaaactgcggataaagcgagaaattgctttgtctgcggtttttttattaaattaaacagattctaatgacaatctgaatagcagagtctattggttataattcatttatctcgcattgatagtttaaagcatctaattcccattatagataaaaaaagcaggtagcccttatcgcatacctgctttttctctgttttaaaaatgatggaaactttccaccggcattacaaacacggttgcgccgccaacttgtacttcgattgggtaaggcacatacgtatctaccgtcacacctaaggaagcggatggtgtcatcatttgttcgcgtgctttacagttttccttgattatcgctagggcatcttctacacgttcatcttctgtaccgatgataaatgtggtgttgcctgcttttaaaaatccaccagttgtagctaacttggtcgcaccgaaattgccttttgtaagtgcgtcagacaaacggttgctatcttggtcttggacgattgcaaatatcagtttcaaagaaatcaacccttcctaaaaatctatctttttttctattatagcaaacaaacgccattttaaagagcgatatgcacttgtggcaaggtgttgaagtcccactagatgttaggctaattgtcgtaaaatgtcggctaaaatagtttctgtgatttcttctggtgtctttgtagcgtccactcgcataaaacgttccgggaacatgttgatgactttttcgtagccagcttggactttttcgtggtaggtaatatcttctttatccaagcgattgacttcacggcccttattagcggcgattctagctaaaccgacttcggcaggcacatcgagatagtacgtccggtcaggcaatgtatcctcaatcgcatataaattcacttgtaaaacttgttccatattcatgtcacgtccggcaccttgatacgcaagagagctatccatgaaacggtcacacagtactgttttccctgccgctagagctggacggattgtttcaacgacatgttgacggcgcgctcccgcaataagtagtacttctgtttttgggtccatttcttcattgccaattccgagcacgatatttcttactttttctgaaatcgggctgccacctggttcgcgcgttttaataaaatcaatgccagcttccgtcattttttgattaagtagtgttcctactgttgttttaccagagccatctgggccttcgagtgtaataaaaattgctttcatttagtaatttcctttccctttcgtgtcgctttctgtttgattatagcataaattagcggaatacacggatgtaattctcggctagtttttcgccgccttggtagtggcgtgtgcgaatgttttttagttcgcggatatgcttttctgtgatgctttctccgcggatgattgctgggattcccggcggatagagcgaaattgtttcagccgaaacgcgtgtcgtagcttcatctagtaatacgaattcggtcgcgcgtgcgtgcatttcttcgtaagttagcgcaagacctgacgcaaaaggcgctgacatttcatatggttctttcgcgatttcttttttcaccggagaatgaatccggctaataggcgtgaaatcaatcccttttttaattaatggtaaaatcagtaatacctgtgactcatcggcaagctctgggaaataagagctttcttcaaaaattgcttgcagttcgtagcccgtgtagcctgttttgcgcacgatgattttaagcggatcatctggcaaaataacgtcaaatttattcttcttcagccatttaatccatctggcacgcattttccaaaaagcttcgacgtccgccgctgtgtaagttgccgcatatttcctcgccgcatcaagtgacgccataattaaataagatgggctgctcgtttggaatacttgcaggtaataaggtagtttttcaaaaatcggtaaatcattcaccacatgtaaataggaacccatcgttagcgccggcaacgtcttatgcgccgactgaacaaccacatccgcaccaagctccactgcacttttcggaaattcagaacttgttaaaaagtgggctccgtgcgcttcatcaacaaacacaaccgcaccaaaatcatgcgcaatgcgaatacatttttgcaagttaaaagtcgttccataatagctcggataagtgaaaatacatagttttatatctgggtgattatgtaatgtttcttcgagaagttcggttgtcacgccactcgcgacgccaacttctttgtttgtcgctggggttaagaaaatcggttctccgcctgccagttcgattccatgcaagattgatttatgagcatctcttggcactaaaactttctccccgtgcttcaacgtcgccataataactgccaagcttcctccgcttgtcccattgactaaaaagtagctttttttgcttccataacattccgcaagtaactcctctgcttccaaaatcacatcttctgggtgatgcaaatcatccattccagtaatttctgttacgtcccatttcaaaaatttttgccatgcatctggataaatggctccgcttttgtgtcctggcacatggagtgatattgggcaagacttagcatgagcatctaaccgttccactaaaggcattttagattgattcctcataacaattccccttttcaaattctctccttcattgtaccattttgctgggtttatgacatattcttgcagttttaaagcgttttcattttataagttgtataataaagacagcaactacgttttgactttctagtaaagggaaattgaggtaagaggactattttaaaggaggttttttgtcagatgaagaagattcttaacggtactgatcaagtagtagaacagatggtggaaggtttagtgaaatcgcatgctgatgttgttcaccgtgtcgaaggaactcgcgtcattgcaagaaatgataaacgtccaggaaaagtcggacttgtaagcggtggaggttctggtcacgagccggctcatgctggttatgtaggtcgcggaatgctctctgcggctgtatgtggcgatgttttcacttccccaactcccgaccaaatttatgaaggtataaaagccgcagatcaaggcgctggtgtacttttaatcgtaaaaaattatactggtgacgtaatgaattttgaaatggcggcagatttagcagatgccgatgatattaaagtagaacaaattgtagtagatgatgatattgctgttgaggatagtacttttacaacgggacgccgcggtgtagccgggactgttctcgtgcataaaattatcggggcagccgcagaagcaggcgcatctcttgatgaactgaaagcccttggtgaaaaagtaattgcttcggttaaaacgcttggtgtcgcacttactccatgtactgttcctgaggttggacatcctggctttgagcttggtgacgacgaaatcgaacttggcattggtatccacggtgaacctggctttacgcgtgaaaaaatcatgccatctgcaagtttagcgaagcaactgtacgaacggattagcaatgaaagtaaactcctacctggagataaagtggttgtgctcgtgaacggcatgggcgcaacaccacttatggaacaatatgttttcgcaaatgatgtccatgaacttctaaaaaatgccggcgttcaagttgaaaaaacactcgttggagattatatgacttctcttgaaatggctggtttatccttaaccattttgaaattagaggacgaaaaatgggttgatatgttgaaactcccagtggacacaattgcatggtaataaaatttggaggaatgaatcatgacttatgataaagattgggcgttacgctggttaaatgacttcggcgaacgcgtacaagaaaacaaacaattattaagtgatctcgaccaagcgattggcgacggagaccacggtatcaatatggctcgcggactcggcgaactcaaaaaagctttcacagaaaaagaacccgctgatttaaaagatgtatttaaaaccgctgggatgacgatggtcagcaaggtcggcggcgcatctggaccactttatggaacagcctttttaaacatgagtaaagcggtagattcagaaacaattgacgcggaaggcttaaccaaagtgcttgaagcaggacttgaagggattgaaaaacgcggtaaatcccatgctggcgagaaaacaatgattgatgtttgggaaccggttgtaaatgcgattcatcaggaagatttaacagatgatgttgttgatgccgctttacaaaaaacaaaagatttaaaagctactaaaggtcgcgcgagttatcttggtgagcggtcaattggtcaccttgaccctggcgcttactcttctgccctgctatttcacgcaatgcttcaaacggaggtgagctaacccatggctaaaccttatggcgttgttatcatttctcattccaaagatgtggcaaaaggcgtccatgatattattaaagaaattgccccagacgtctctatcacgcatgccggtggaacagaagacggtcgcattggcacaagttttgatgccgtaaatgaagcgattgaaagtaacgaagctaataaagtctacactttctacgacctcggaagcgccaaaatgaatatagaaacagtagaagaaatcagcgaaaaagaaattattctctttaatgcaccaattttagaaggt

SEQ ID NO: 3853 - DNA, 7044 bp, Listeria monocytogenes 4b
  misc_feature (1)..(end): n can be any nucleotide: a,g,c or t/u
actactttgggacacctcctcgcatgtttgagcggccgacagtgtgctggaaaggatatgacagtggtccgtaaaccaaaaatcggtgtgtatattgagggtgataacaaggcttttgccgaagttagccgatttctagataaccaagtcagcccaatcccatcaacgaaagaagagcgggttatctacattttcagtaaattgcttaaagcagacgactatatcacgattcatcagcttgcagacgaactttacattagccggagcacgattgagaaaaatatggttgaagttacgaaaatgctggaaaaagaaggtattactttgtataagaaacctagtaagggcatgaaactccttattagtgaacgagaaaagcgcgccttaacatcgaaatttattaataatttttggggcaataattggtatttaaagcaagaaggcgaaaaggtcctccaagcttttgacacgattaaagccgatgtcaccggaatttttccagaagagggcttgaaagaaatcattgcgattgttcaagcatttagtgagcgacatgattttgcttttactgattatgcgtttcaatcgattgtcattcaccttgcgattgcggtagagcgtattcgaacaggagagtatatcgaaaatgttgagagcgatccaatgaaagatgtatttgattcgcagcgaaacaatacggaaatcctcgttagcatgctagaagaccgtttggatattaaaattccagcatttgaagtcggctatattcagttgcatttaacagcagcatataaccaacagcatgatgagttacttgtaagcgttcgaccaaaagaagacgatgtggcagaatttgtcagcacgtgtttagcggaagggaattacgataaaagcttactggatgacttgacgacacacatgaaatccgccattaaccggttaaaacttggtatgcattttaaaaatccgtaccttagcaaaattaagcaaaactttccccaagcgtttgaagaagcgctatattttaaagcaaaatttgaacaaaagtacgatgtgcaagtgaacgaagatgagacggcgtatatcgcgctacattttgaggcatacaaagaaagaagtcgttctttccccgaccaaattcgagttgtacttgtatgcagtaccgggcttggttcatcaagattacttgcggcgagaattaaaaaatattttccaatgattacgattgaaaaaatattatccgttcaggcgttaatggaaacagaagtcgatgtggatttagtcatcagcacgatttatctcgaactggaagatattccaagtattgttgtcagtccgatgatgagtaaagccgatttacaacaagttgaaagccaaatcgaacgaacgagacgcaagaaaaagaaacgcagccaaccatttgttgacttgattgaaccgaaaactatttttgcgaagctagatgttgcaacgatggaagacgcaatcacgcaaattggtgataagcttgtgaatcttggtattgctcaatcagggattgttgaaagtgcgctaaaaagagaagcgttatcgttcacttcttttgaagaaatggcgacaccacacgcagatcctgcacttattaatgaatcgcacatcgctattgccacacttaaaaatccagtgaaatggggcttagtcgaggtggataaaatcttttttatcgctctgaccgaacaaaatggcattaatttagacgcgatgtatgaacagttttataaatatattgataataaaaaatggcttgagaagctgacacaactaaaaagtgccgcagaaatttatgagcatttgttaaaggatgggatgtaatggaagtaaaagatattttaacaaaagaattagtcgtctttgatttagaggcgacgacaaaagaagcagcaattgaagaaatggcagaaatgctagatgaacatggtattttagcggataaagcgacttatgttcgggcagttttggatcgcgaagcacattcaacaactggaataggaaataacattgctatcccacacggaaaaagtgaaagtgtcacaaaatcggccatcgtttttgcaagaacgaaagaaatgattgagtgggaatcactggatgacgaaccggtaaatatgattttcttactggcgattactgattctgacaaaacagacggtcacttaaaaatccttgcagaaattgcaacgaaactaatggacgatgatattgtcgaaaatttaaaaaatacaagagacgaagaagaagttattcgaattttaaatggaggcgtagtagagatatgaaacgtaaaattatcgcagtaaccgcatgtgcgacaggagtggcgcacacatatatggcagcacaagcacttaaaaaaggcgcgaaaaaaatgggcaatcttatcaaagtagaaacacaaggcgcaacaggaattgagaatgaattaaccgaaaaagatgtaaatatcggcgaagtagttattttcgcagtagatacaaaagttcgtaacaaagaacgttttgatggtaaagtcgtgctggaagttccagtaagcgcaccgattaaagatgcagaaaaagtaatcaacgcagcacttgcgttaattgacgaaaaataaggaggatctaccatgttcagaaaaattgggagtgaactgaaaaaacacgttttaacaggtatttcatatatgattccgctcgttattgcaggcgccgtgattatggcgattgctcgggttggtggttcgtttttcggaattacagatatttgggatgcgaaatacgcagacagtgcgaatagtttaatttcactactgcatagtttagatggttttggtggcttggcgctaggaatgatgttcccggttattgcagcatttatcgggtattcgattgcggacaaattagcactagcacctggtcttgttggtggtttactggcacgtgatattggcgctggtttccttggggcactggcagctggtttaatcgctggttacacatgtctattgattaaaaaatacgtgaaactgccaaaagcggcggcttcgattgtaccggtatttttagtaccagtttttggcacacttattaccgttcttattattaattatgtggttggtattccttttgctgacttaaatacagcccttgaaaattggctaaatggtatgtctggatcgaatcaaattctaatggcggctattatcggagcaatggttggttttgacttaggcggacctgtaaataaagcagctgtaacaacggcgatggcactattaacaagtggaatttatgcaccaaatacagcagcacaagtagcaatcatcatcccaccacttggtcttggtttagcaaccttaatcgcaaaacgtaaatataatactgaaatgcgtgaggcaggaaaatcttctcttatcatgggacttgttgggattagtgaaggggcaattcctttcgcggtagaatctccgcttaaagttattccggctacggttcttggttctgctgtcggcggcgcgctagctgtaggtcttggcgcaattaaccaagcgccaattagtggtttttatggctggttcacagttgaaaattggccagtttacattttagcaattgcagttggaacgctaatcgttgcgggtatgtcagtcgctttacgtaaagcaagtgctggcgaggaaatggctggttcaagctacgatgacgaaattgacgaagcagaatgggaagcttaaaaaacggaggtaactatggttaaagcacatattgtgaaccatacgcattgggaccgagagtggtattttacctcggccgatgcactggttctaagtgaacaactttttacagaagtaattgacgaattaaaaaagcacccagaagcaaactttgtacttgatgggcaactgtcgattttagatgattatgtcgcactgtacccggaaaaattagcggatattaagcaattaattgcggataaacaacttttcattggaccgtggtttacgcaaacagatgcctttttcgcgcatggtgagtcgattttgcgcaatgcgatgattgggatttttgatagtaaaaaatacggcgactatatggaaattggttatttgccagatacatttggttttaatgcccaaatgccgactttacttgaacatgctggctttgataatgtgattttctggcgtgggattcatcttggtgaacatgttgcgtctccatattttaaatggcaaggacttggagaagaagcgtcgatttatgcgattaatatgccacaaggttacggcacagggatgctccttgaaccaacctcggcatatgtggatggacgcctcgacccggcaattgatttcattgaaaagtacagtaaaacaactgaagttttaattccatctgggaatgatcagctgaatattattagtaactttgccgaaaaattagtggaaatcaacaagatgggacgccatgattatcaacttagtacctatcaagattttattcaatatgttagagagctgcctgacttagaagaatatcgcggggaatttagaagtccggttcttgcgcgagtgcataaaaccattggatctagccgaatgaatattaagctaaaaagcgcgtcactcgagcaaaaattgctaacacgtattgagccacttcttgttattgctaaagcatctggaatttctattagcgagcgtttactaatgcatacgtggaagaaacttttagaaggtcaagcgcatgatagcttggcgggctgcgtttctgatccagttgccgaagatattttgcaccggatgaaagaagccgacgaactatgcgatagtatcgaaaacacgattgtgaagaaaattgccgatgatttgtcacttgcggcgaacgaaattatcgtttttaacacggattcacatgattttgacggatgtaaggaaatacaagtagtaaccgagcataaaaacatccatttcccagcgtttccggacgcaacgattgtccaagaagagttcattccatcgcgcgaaaatgtgctagaagaaacgccagctgggaatcgatttattgaagaacctggctactatgtgcttcaagtgcgcgtcaaagtggagcttccaggccttggctaccgggtgattgcttttgaagagaatgaccgcgaactggattcgatgattgcttccaatgatgtggcaatcacgaatgatttctacaaaatcacttttgaaaatggtgaaattgctcttgaaaaaccaaacggcgagcgcatcacttcttttattacgctagaagatgatgtgaatgcaggcgatacgtatgattattcaccactagccggagatatcgcggaattattcactttttccgaagcaaaaacggagaaatcaagtgaagtcgaacgtttaattttaacaggaaaaagcgatttcccgcttgatcgtttggcgaaagaagggcatggcgacctgcaaatcaaactcattttagaggtgaaaaaaggtagcgaactgctggttgttaatgttgaagtagataaccaaattaaaagtcaccgtctacgcttaaaagtaaatacaggtgtgaaaacagactacaacatcgcgtcactaccattcggatatatcgagagaaaaccagttgtaccagtgaattggcgagaaacatatagcgaaatgccaatcgacatcgaaccactggaacaaagcgtgacgctaacaaatgaagcagaaagttgtaccattttcacacagggcatcaaagaataccaacaattggatcaatatttagcactgacgctactggcaacaaccggacaactcggaaaacctgatttagcataccggccaggccgagcatcaggcgacacaacgaaaaaaggtcacgtgctcatcgaaacagaaggtgcgcagttactaggcaaacatgaattttcattagccatctatcttggcgaccaagctttcgacgaacataaaaccgctgaacgaacaaaagcgttcaaccaagcaaacgtgtcttaccagcgtcaaccattcaaccactttttacatcgcttggataacaaaatccagaaaacagaacggaaattaggcgcgaagcaaacgttaggtatgttgaatttgccgaaagaatacttagtttcagcgtgccacccgtcctactactcagcagataaatacattatccgcctggaaaacccaactaacacaccacaaaagttggcactctcggatatgtcgtttgagtatgtgaatgctatcgaagaagttgttgcaaatgacaacaacacgattccagcatatggcgctgttacgttacgattagaaatatagaaagaaaacttgctcaaagtatttattttgagcaagttttttgtattaatcgtaaaaattccttcgaagcactggagaaagtttgattcttcttccacacaatactaattccagcaattagaggcggcgaaaaagggataaacttcaggttagtattttccgtattgataataccatcaatacaaagaatacttgcgatgttctccttagcgagcaaagaggcattatacagtaaattatatctaccaattacattcaattgttcaaaatgctctccaagccaactagctagctgattatcaatgaaagattggttggaaacgacaatcggattagcttcaatatcactaggagttacaaccgcttttttcgctaaagaatgttttgtattgactaaaattccccaagtatcttctatattaagtggtaaatattcatattgtagtttttccacaggattaattaccaaaccaaaatctagtaaaccgtgctcaattttttctaaaacatcatccgcattgccgctatgcaattgaaaagtaatgtcggaatgcttctctctaagttcatgtaacatgctaccgataaattcaaatcctctcgtttcagcagcaccaatcattatttttccgctaatcgtctcattttgaagtaaattcgaagtagttaactccactaaagataaaatttctttc

SEQ ID NO: 3854 - DNA, 5711 bp, Listeria monocytogenes 4b
  misc_feature (1)..(end): n can be any nucleotide: a,g,c or t/u
ccatacacgcatgccctgagcggcgccaccgtgctggaaagatgggtaacgtaaatcattgtagtatctaattgttggtgaacctttgtgatttccgcacgcatttgcacacgtaatttcgcatccaagttggaaagtggttcatccattaggaagacttttgcgtcacgaacgattgcacgacctagagcaacacgttgacgttgaccaccggaaagtgcacttggtttacgttttaagtattcagttaagccaagaatatttgctgcatgctcaacacgttttttaatttcgtcttttggcattttacgaagttttaaaccgaatgccatattatcatatacagtcatatgcggatataatgcgtagttttggaataccattgcgatgtcacggtcttttggcgcaacattgttcattactttaccatcaatagatagttcgccttttgaaatttcttctagtccagcaatcatacgtaaagttgtagatttaccacaaccagatggacctacaaaaacgatgaattctttgtcatcgatttctaaattaaagtcagataccgcagttactttgttatcataaattttataaatatgttctagtgataattgtgccaactttcttcgcctctttctatttttcaacttgtgttcattgtatatgaaaacgctttacaaaaactatggcaatttgcacaaagaaaaaattcatctgttgggcaacttgcataagtagcaaaaaaataaaaagaagtaaagggacaaaagaccttttatgtgaaagatttttcacagcgcttaattctttagtcccaattccggaaattcctcagatatcattacaataaaacttcatcttgtgttatattattaaagcagacacaatatatagttagtgggggattatcatgtacgtggaacaacttaatgaacaaatggtaataaaaagggacggccgtaaagcaaactttgatttaattaaaattcgtaatgccgttgaagcatctatgaaagcaattaatttagaggacgagactttcttagaagagattttgcttgaggttgtaagtgaattacctaacaaggcagatatgaccatcgatgaaatccagcattgcgtcgaaaatactttaatgaaatcgacgtatcctgatgtagcgagggcttacatagaataccgccatgatcgcgaccatgagcgtgaaaacatcacagatatgcacaaaagcgtagaaaagctactacaaaaagacaaaacagtagtaaacgaaaatgccaacaaagacgcgactgtctttaatacgcaacgcgatttgacagcaggagccgtagcaaaaagttacgcattaaaatacatgctaccaaaacacgtatccaacgctcatttaaaaggggaaattcattttcacgatttagattacagcccataccatgcgatgaccaactgttgtttaatcgacatcgaaggaatgctgtcaaaaggatttacgattggtaatgccaacgtagaaagcccgaaatctatccaaactgctaccgcacaaattgctcaaataatcgcaaatgtagcaagttcgcagtacggcggctgttcggttgaccgtattgatgaagttttatccgtttacgcgcgtttgaactttgaaaaacataaaaaagatgcgatggaatgggtcgttccagaaaaacaagaaggctatgcagcggagaaaacacgcaaagatatttacgatgcgatgcaaagcttagaatacgaaatcaacacattatatacaagtaacggccaaacaccgttcgtaacactaggcttcggtcttggtgaagattggtttgcccgtgaaattcaaaaagccatcctaaaagtgcgtattggtggggttggtaaagataaacacacggctattttcccgaaattagtattttcaattcgccgtggaactaatttaaatgcagaagatcctaattatgacattaaacaattggcgctagagtgttcctcgaaacggatgtatccagatgtactcaactacgattcactcgttcgcttaacaggcgatttcaaagtaccaatgggctgtcgttcgttcttgccagcttgggaaaacgaaaacggcgaacacgtgaacgcgggaagaaacaatcttggtgttgtaacacttaacattccacgtatcgctatccaaagtggtggggacaaagaacgtttctgggaaattttccacgaacgcatgaaaacagtcaaagatgcgctacttttccgtttaaaccgcgtacgtcaagcacgtccagaaaatgcaccaattttatataaatacggagcatttggcaaacgactacaagatggcgaaaatgttgatcaacttttcaataaagaacgttctactatctctatcggctatatcggtctttatgaagcagcgactgtattttacggcggtgaatgggaaggcgacaaagaagcaaaaaacttcacgcttgatatcttgaaagaactaaaaggttatgcggacaactggaaagatgaatatggctactggtttagcgtatattcgactccaagtgaaagcttaactgaccgttttaaccgtttagacaaagaaaaatatggtgtaattaaagacatcacagataaagactactaccaaaactctttccactatgatgttcgtaaaaaaattaccccatttgaaaaaattgattttgaaaaagattatccagaattttgctctggcggattcattcattattgtgaatatccaaaaatggttcacaatacgaaagcacttgaggctgtatgggattactcctatgatcgtgtagcttaccttggtacaaatacaccaatcgataaatgttacgaatgtaattttgaaggtgaatttgttcctacagaagaaggcttcaaatgcccaagctgtggcaacaccgaccccgaaaaagcagatgttgtaaaacgtacttgtggctatttaggcaacccaatgaaacgtccaatggttcatggacgtcacgtagaaattagcaatcgcgtgaaacatatggagaacttaggtgaataatccaaaaccgtgtgaatggaagtcgaatgaattatccagagggtatatcgccgactataaggcattcaactttgtcgacggagagggcgtccggtgcagtctatatgtatctggatgtcctttccactgcgaaggctgttacaacaaggctgcgcaatcatttaaatacggcaaaccttacacgaaagaattagaagacgatatcctaaaagacatcggacatgaaagcgtccaaggcctcactttacttggcggagaaccatttctaaacaccgccacatgcctatctgtcgtgaaacgaatccgcgcgacatacggcgaaacaaaagatatctggtcatggaccggctacacctgggacgaaatgatgcaagaaaccgccgacaaactagaacttctatccttaatagatgttctggtagacggccgcttcgaacaaaaactattcgaccccaacctagcattccgcggttccagcaaccaaagaattattgatgtgcagaaatcacttgctactggtgaagtggttttgtatgagttgtgaaataggccctctttgatggagggcttattctttttgctttggatgcttattgaatatatgtgcgggcatagaatcaacaatgtaagaatgatgatagtactaatccaaataaaaaacgccacccataactcaggtggcgttttttaatcaacaaattgtctagctttcacataatcgtacaattccttatttctaacaacccattctcttccatttttccaaatcttaccttgttcttttaaaagggttaattgtttgtaaaaactgcttttcgatagattgctataagcagcgatagtactagttcgcatttctttcggtaaaataacactatctttttcataaagcgttccgtgtaatttgcccatattagaaaaagaaagctctaatttatcagaagaactagtctcggcgaaaaggcttttgaagaatgcatgtcgcgccaagtctcgcataatgaaaaattgaaaaccaaaattctctggaaacatcgaaagaaagtactctaaatctttaaaagaatatttgtaaatagtgcacggggaaatggttgtaaacagaaagtcatctacatttccttggaacaaactatagtaatttacaaaagagcctttacctaagactgtataaatactactagattgcggattcatagaaatagacacgaagccttctacaattaaatagacatggttatttctttgcgaggcagtatttactaaatctgtatgttttggaacttttaatttttcatatttaatattgccttcatgagaaagccgaacaaactctttataattaaataatgcatccattattagcagcccctttactttttttgttaactataatacataatatcaaaattaacaaaaaattaatctatattaattataccaaattgccacttttttgccgataatatgaacatttaatgagaaaaagatgcaaaaaatattattttgcatcttttagctatttagtaaagctcaggtcgtctatctgtgaaaactggaatgatgcctcgcgtttcagcaacaagttttaagtcaatctcagcataaatatttccttcgtcttcaccgccatgagcgacaatatttccaagtggatcaatcacaagtgagtgcccattgaaatgattattaggatcatcgccaactcgattgactgcaacgacaaaagcttgattttcaatagcgcgtgcaataagtagttgctcccactgagtaacacgttcggctggccactgagctgaaacaaaaatgacttccgatccttctgaagtgtgtttgcgaatccattctggaaatctaatatcatagcaaatgaaaccagcgcaagaaacaccgtccagtcgaaatagatttttatcattcccagcctctaaatagagatgctcattcataagctgaaataagtgaaccttcttatatgaagaaagtagtccaccatatttgtcgaaagcatacattgtattagaaaatttggttccttccgaaatagagaccgagccaccgataatagcaatttggtgtttttcagaaagtgttgctaaaaattctttcgttctctccccatttaaatcagcaaccccagctaattcatttaaagcataacctgtattccacatttctggtaaaactgcgatatctgccccattttttgcagcttcaactatagctttttcaatccgtgcatagtttgcatcaggatatttaaaaactacatcagtttgacataatgccaacttccacatgttcttcgctccctttttcttttaaaaataacacaagcttggtgacgagtccatattggaacacttcgcaccaagctctaagtagtgaattaatcttttttaagacgtctagataagaaattaccgaatgattgtagtgcttgtaccatgataattaaaataataatggttgtatacatgacagttggttcgaaacgttggaaaccatattggtaagcaattgttccgagtccgccagcaccaacaagtccagccattgcagtcgcgccgattagaccgattgtagcgatagttaagccaagaacgataccagaccgagcttcgcgaataacgacactccaaatgat

SEQ ID NO: 3855 - DNA, 5998 bp, Listeria monocytogenes 4b
  misc_feature (1)..(end): n can be any nucleotide: a,g,c or t/u
taacagctaataacatatcaaattcatttatcgaacattgtttacccttagcccctcgtcaccccggacgaggggcttttctttttatttataaaaatatttttggattacaaatagggcgcagagccaaagttaagatagttaactattttttaaataattttattataaaaaacggatattttttaagaaaaaggtagaaattgtcctatttttattataaaatgatattatgcgatttttttaaaaaatatttataggtataggaatgggagttgtattttatgttgaagttgttgattgtcgacgatgcaatgttcatgcgtacgatgattaagaatatcgtgaaagatagcgattttgaagtagttgcagaagcagaaaatggactggaagcagtgaaaaagtatgatgaagtaaaaccggatatcgtgacactggatattacgatgccagaaatggatggcttagaagcacttgcgcaaattatggccaaagatccatcggcgaaagtaattatgtgctcagcgatggggcaacaaggtatggttgtagacgccattaaaaaaggtgccaaagactttatcgtaaaacctttccaagcggaccgggttttagaggcgttagaaaaagcagctaagtagagaaatggaggtggattgcatgactacaaatatgttagacctgtttatagaagaagcttcagaacatttacaggcgctaaatgataatctgttacagcttgagaaagacccgacgaacggtcagttagtaagtgaaattttccgttcagcacatacatttaaagggatgtccgcaacgatgggcttccaacaggtggctgatttaacgcatgcaatggaaaatgtactagatgaggtacgcaataatcgattggctgtaacagaacatttggtagacattatttttacatgtacatctcatttggaaacaatggtttcggatatccagcacggcggacaaggcgcggcggatatttcgaaaaccgtagctgacttagaggcgcttttacatccagaacaagaaacagatttagcggtagaaaaaacgtatcgcattcagattcaaattgaagaagcagctattttgaaagcagtacgggcggtaatgtgtttagagcgacttgcagaaatggggattatttcagaaacaacgccagacagagaagcgattgagctagaagagtttgagcagtcattcgaagtagtcctagagtcggcgcaaacaaaagaagaaatcgaagcggttgttctagatatttctgaaatcgaaaaagtgactgtgacagaagaagtggaagaagttcaggttattgaaccaatcaaaaaagccgcaaaacaaacaaccaaacgattagaaaataaaaccattcgtgtacaacttgaaaaaatcgaaaagctaatgaacgtttttgaagaaagcgtcattgaacgggcgagaattgatgaaatcgcagaaaaaacgaataacaaagaattgatggaacacttaggacgattcagttccatctccaaagaaattcaaaacggcttactaaatatgcgtatggtgccagtggatagtgtgttcaatcgctttccaaaaatggtgcgcacactagccaaagaattaggtaagaaaatcgacttagtgattgaaggcgcggatacggaagtcgacaaaatcgtcattgatgaaattggcgacccacttgttcacttaatccgtaattcagtagaccacggtgcggaaacagtcgaagtaagacgtaaaaatgggaaaaatgaaaccgccacaattaatctaaaagctttccatagtgggaacaatgtcgtgattgaaattgcggatgacggtgcgggaatcaataaacgcaaagtgttagaaaaagcgattgcgaaaaatgtcgttacaagagcagaatcaaccaaaatgacggacgcggaaatttttgatttattatttgattccggtttcagtaccgcggatcaagtatccgatctttctggccgaggcgtgggactagatgttgtccgtaatacgattctcaaaatcggcggaaaaatcagcgtagaatcaagtgaaaacgctggttcgacgttccgaattgagattccgctgacattatcgatcatccaatcgatgctcgttgcaacatcagaacgtcgctatgctgtaccgctggcaaacgtggccgaagccatcacaattaatcctgcagacattcaacacgttcacggcaaagacttaatcaactaccgtgaaaccattatcgaagtactcgatttaggcgaatgcttccatgaaacacctttgaatgacacggatgaattactattactcgtcgtgaaaaatgccaagcgaacttttggacttattattaaagatattatcggtcaacgggaaatcgttttaaaaacacttggtggctttttcagcgaaagtcagattgccttttctggagcaacgattttaggcgatggtcgtgtcgtattaattttaaatttagaaacattttaaggaggaaccatgatggaacaagtatttcaagtagaacttcctgaatgggaaccgaaagaaccgagccaagaaggacgcgaaaaaggctctatccgccaagtagacaatattggcgttaacttaatcgtccgccttggaaaaaaagaaatgccagtaggggatatcgccgagctaagcattggcgatgtcctcgaagtggaaaagaaacctggccacaaagtcgaaattttcctcgatgaaaagaaagtcggcatcggtgaagctattttgatggacgagaacttcggaatcgttatttcagaaatcgactaaagaaagagggcaagtgatttgaagcaagaggcttacaacgcagtgaagatgaaagtggaccaagagaaaacggccattttaaaggaattgcaattattactatccaaacgggaaaaagtcgtagaaaaattagcgcacgaaaaagaagtctattactcgagaacgaaaaaagaaagactccaagtggcggtattagccggaagcatgcaactagatgccttctcgccgagccgcattcaacaaatggagcgagaaattcaccaaattagccagtacattaaaagcaatgaacaaatcttagagcaactagaagaaaaaggaaaacaggccaaaaaaatgtacgatgacacacgaaaaaaatggcaacagcttgaaaataaaagagaagaacaaacattacgcgatttaaaaatggtgctattaaagtaaaagggaggaaaacgcatgctaatcccagataatttgctacaaccactcgtcggaaaaaaacaggtcgaaccaaaagaatcgttagcagaagaattagtagaactaccttttatttcacttttaatggaaaatagccctgcgccgctcttaaagggagaagcggataacggagaacaagctacgctaccactaaaagaaatcgcccaaccactcgtttcagccaagctactcgacgatgcaccagaaacgaaactgcaagtagcaccactcgaactcaaagaagtgaaagaaacacttgcggcaatcgccaaacaagcaattgatcaacccaaaatagaaaacgccccgcaagctgtagaaactccagtaacaaatacaccgaaagaacccacaaaaaatgccagtagggagcaacaaccgccaccagaacttatcatacctacaaaagaatcacctaaactagcagaaaacgtggccaaaaaccaaccagtcctagccaaattacctcaagaaaaagaagtcgtgcaacttttcaaagcgagcattaaagagccagtaactgccaaggaagaagttgccgtcaaaaagcccgcagaatccagcaatatttggcatgatacggcgaaacaactcacgccagctgccaaacctgaagtcccagtgacgttaaaacaacttgataaaaccatcaccgaccaaatcgaacagctacaaaaattccaagtgaaacaaaataaagcctttttcgccatccagccggagtcactcggaaaagtcgaagttttacttaaaaaaatgcccgataaaatatttgtacatatcgaatatcaggaacaaacggcgaaacaaaaactcgaacagatggcgcaagatttgcataatcgtttccgagatcgcggcgtagaagttgccgtgacaatgacagaaaaacaagcaccgaaagagaataaccaaggctcggatggtcgacaccaaggtgaatccaaaaaagaaaaagaacgcgaaaatccacatcaggaaagagctaaacaagaagcatttgatttagaggaggagacgtaatttggacggaattagtagtttatcaggagccggtcaggatacaaataatgtagtaacatccagcgtatccaaaacccttggcaaagatgacttcatgaaactatttttaacaagtttgcaataccaagacccatcgagcccgcttgatacgaatgaaatgatgtcgcaaatggcgcaactttccttaatggaacaagttgccaatatgaccactgccgtagataagctttctgaacaagcgcaaaactccgccttgcaatccgcggttaatttcatcggtaaagatataaaaggtgtttcgctgaacggcgaagtaattagtggaaaagtcgaaagcgttcaacaaacgacaaacggcgtcatgctgaaattaaaagataacgatagcctcgtgccaatgacatatgtaacagaaattaattaaaaatttgggagtgtgaattatgaatcaaactatgtatacagctatttctgggatgaatgcgttccaacaagcattatcggtaacatcaaataatattgccaatgccaacacgacaggatacaaaaaacaaagcgtcgttttcaatgatttactttaccaaaacacaatgggatctgttgcaggcggactttatgctggaacaaacccaatgagtttcggttccggttcaaaaattggagcgattttaaccgattatacagcgggttccccaacagcaacgggcagaaataaagatgcagcactacaaggtcgcggctttttcatcgcgggcgataatgcagggggcaatatcgtttacacgcgtgacgggagcttcgccgtttccgacaacaattatttaactacccaacaagggaaatacgtaatgggttacgcaacagacaaaaatggcaacgttttaaacggtaatttgcaaccaattcaaatcccgctaaatagcgcaattccaggagaagcaacaaaaaacggtagcttaagcggtaacattccactagactggggcgaaaaagatacgatttcttccgagctttctgtatatgataatgctggcggaaaacataaacttcaagtgaatatgaaagctgctacaccagatgcgagcggtaatgtttcctacgaatatgaaattcaaatggacggaaaagcattaactcctccagtaacaggaacacttaattacaatgcgcagggcgaattaacaaacccagacgcacttaaaaatatccaaatcaattccacagtaaacggcaaacaagtcaatatgggcttaaacctaagtggcttaaccaactacggaacaaaccaagtattctcaccaacttctgacggtaaaggcgctgcgactgtaaaagattatgcagttaccgattctggctatattgcagtgagttactcagatggtacagttatcccagttgcccaacttgcggtggctactttctccaatgaagacggcttagtcaaaatggggaacggcgaatatgttccaggattatcttctggcgatgcagtatacggcgttgctggccaaaatggcgctggcggaattagcggttcttctctagaaggttcaaacgtacacttgtcccgtgaattcgttaacttaatgacataccaaaatggtttccaagggcatacaaaagttattcgtgtgccggacaacgtgatgaatcaaactgtgcacttgattca

SEQ ID NO: 3856 - DNA, 6077 bp, Listeria monocytogenes 4b
  misc_feature (1)..(end): n can be any nucleotide: a,g,c or t/u
cacttgtaatcggtttctttttgtgctatagtgtgggagaaaagcataggattgttactgctaaggcgggcaaaacctgaattaattcaagtgctattttgatattaatagcattggaattagtttgggtttttttcttttgaaagaggtgaaaatgcatgattatcaaaaaaatactgaataacaatggtgtaatcgccgagggtaaaagtggcaaggagtctgtagtgatgggtcgtggtcttgcttttcaaaagaaacttggagatgaggtggaggtatccaagattgaaaaaacattcgtaatggaaacacatgaactttcagaaaagctctctgagttacttagtgagattccactgaaacatttacgtgttgcggatgacgtggttcagtatgcgcaagaaactttggaaacagatttaagtgacaatatttatttgaccctaactgatcatattaacttcgctgtgtcacggtataatcaaggtattaatttgaaaaacgcattattatgggaaataaaacgattttatcacgcagagtatttggtgggaatgaaagcactagattttatcgagcaagaagttggaattcgtttagatgaggatgaagctggttttatcgcgcttcacattgtaaatgctagacaagatgggcaacagatgcacatgactgtagcgatgactcaaattgttcaagatattttaagtattgttacgtatcattatggtatggtattggatgaaacttcactgaattacacgcgttttattacacatttacagtatttcgcgcaacgtttgcttcgaaaagagattgtcgattccggcgatgactttttatatgaacaagtgcaaattaaatatccagaagcttttaaatgtacgaaaaaaattgatgcctatttaataaatacgcatcatacagaactaacgagagacgagcgtgtctaccttactattcatatttatcgtgtcaccgaacgaaatacaattataaaagaagagtaaaatttttttggacttatatgtaatggattacagaaaagtactgcttagcgcggtgcttttttattgtagttttttttctactaaaatgacagaaagtaatacggcaaaaatacttgttgttaataaaatcgagctacgaataaaggcatgcatcgggataaaagcaagtacaagtgacaaaactagaagagaaaccccgataactatccagtagattcctagagattgatgcgctttttgccaagagatttcattttttaaagatgctttcgttcgataactaaagcgactttctttatttttaggtggattcacccggtagatgacaccgagaataataagtaaaagtggaaagattaaatcaaacataacgaacctccttataagtaccatcgtagtataacaaattattgtgaaaaattgaacggtttgtctctaaggtttaatgggtattggtgagagaagatgatcagttattttaaaggaggaaaaaagatgctttatagtgaagacgacaagcgaaaacaggaaagttatcgaatcccactctttggatctgaggaagaaagcacgagtatcccgaaatatgtattaaaaaaggaaccgatggaaccacgtattgcgtaccaactagtgaaagaccagttgatggatgagggaaatgcgcggcaaaacttagcaactttttgtcagacatacatggaaaaagaggcagaaatactgatggcagaaacgctcgagaaaaatgcaattgataaatccgaatatccgcaaacagctgaactggaaaatcgctgcgtcaatattttagccgatttgtggaatgctccaaaagatatgtcttacttggggacttcgacagtaggctcttcggaagcgtgtatgcttggcggtttggcaatgaaatttcgctggcgtaaccatgcggaaaaacgaggtctagatattcaagcgaaacgaccgaacttaattatttcatcaggctaccaagtatgttgggaaaaattctgtgtgtactgggatgtagatatgcgtgttgtgccaatggataaagagcatctcagtatcgatgtagataaagtgtttgatttggttgatgaatacacaattgggattgtcgggattttaggcattacttatactggtaaatttgatgatattcaattattagatgaaaaagtagaagcatataatgaagcgaacgagcatcaattagtcattcatgttgacggagcaagtggcgcgatgtttacaccatttgtaaatccggaattaccttgggatttccgccttaaaaatgttgtttctataaatacttccggtcataaatacggattggtttatcctggcgttggttggattttatggaaagacaaagaatatttaccaaaagagcttatatttgaagtcagctacttaggtggttcgatgccgacgatggcgattaacttctctcgtagtgccagtcaaattattggtcaatattataattttttacgatatggttttgaaggttaccgagaaattcatgaaaaaacaaagaaaacagccctttacttggcaaaaagtgtagaaaaaagtggctactttgaaattattaatgatggcgctaatttaccgattgtttgttacaaaatgaaagaaggactggatgtagagtggacgctatatgacttggctgatcagcttttaatgaaaggatggcaagttccagcctatccacttccggccgatttaagtgatacgattattcaacggtttgtttgtcgggcggacttaggctataacgtggctgaagagtttgcggttgattttgcagacgcgcttcataatctggaacatgctagagtgctgtatcatgacaaagaacgcaacgactcatacggatttacgcactaaaaaagaagacttggatggtgagtccgagtcttctttttattaaagtggaagccagtcgataatttctttgatactcttatcccaaaaatcccaatcatggtcaccggggccttcgcgatactctagcggagcatttttctcaagcgcaaaatctcggaaacgaagattatcttcatatagaaaatcttccgtgccacaattttggaaaagggctggtaatggcacttggttttggagattagtttctaataaatgaaataaatcattttccgtaccagtttggctagccatttcacccgtgatggcacgcgtgctgaaattttcgaagcagtcttctttaatgatataattaatatccatgacgccggacatactggccgcggcttggaatttttctggaaaagtaagtgcaaccttgaacgcaccgtaacctcccatggaatgaccagctataaaagtatcttcttttttatctgaaagtgggaaccagtttttcataacgtgcggcagttccgtactaacaaactcaaaaaagtcgcgaccatgaaccatgttagaataaaagctatgatctgctgcgggcatgacaacagcgagccctttttcagtggcatagcgttcgatatttgtattgcgtacataagtagtgtggttattcgacaaaccgtgaagaatatataatgttttatatttcggaattgagccatgataaagtgcatctgtttcgggcaaatcaccgttacacttgtttgcatagctaaacaaactgatttgaaattaagttctaaaatagccaatgtaggggcctcctgacgtgtctttttttctagtatacatgattttgagcgaaataaaataaatataacttatcttatgagttaactcggaattaaatgtaaaataaagaacctgcgcgaacaggtcctcgttattttttaatacttggtttctttttatcaacgatgtttaagatttcttcgagtttgcgattcttttcgagaatggctgcttctttgaattgttctgttgtgactgggggcatcgtttctttgcaattttcatgcgctagattaggaaaaagattatcggtcatttttcatcgcctccttaagttaattataaagtatcggctaggaaatatcgactatttgaacatagatgaaaataattctcaattaggggttcgtctttttgaatatcgtgttataatttagtaaaatgaaaaggacagtgttgtggaggggaattatgaagaaaataactatattgacgttaagtataacagccgcactactccttgcatcgtgtggaaatgatacggcaactgatacgaataatgaaacaactaaaacggaaagtaaatcgcaagcggctctaacgataacagatatggctgggcgtgatgtttcttttgataaaaaaccagaacggattatcgcactgacgaatgcggatatgaatattatctatgcacttggtggaacggtggtaggtcgccaaacaacagacgcgagtggtgttccagatggtgcgaagaaagctacagaagtgggcaatacccatgatttgaatttagaaaaaattgcctctcttggtgctgatgctattgtcgcaagttcagaacaaaacttaaaagatgttcctgcgatggaaggcgtcggaccgaaagtcgtgttgaccggagccaactcaattgacgaaattaaaaaacaaacagccgtgcttggcgagcttttaggcaaagagacaaaagccaaagagttagaagcgaatattgaccaaaaagtggcggaagtgaagaagaagcaacaaggtaaaaaagtgcgctcattacttgttctaggggctcctggcagtaattacgcggcgctaccatcctcattaagtggaaatgttttagaaattgctggtggagaaaatgtagcgaaagattttaaaggcgttgaaaacttcccacaatacgcttcgatgaatgtagaaaagattgttgctgctgacccggaagtgattttcttaatgattcacggtggggacgaaaaagaaacagaagcagcattcaagaaagaaatgaaacaaaatgaagcttggaattcaacaagcgccgttaaaaatgatcatattgtcgtacttcctgcagagctattcggaacaaatcctggaattaagattgatcaagcattggattatatgacagatgagataaataaggtggataactaatgacaactgtgaaggcgcatgatccgcggcgaaaacgtagacggataacttttattgtagtaatcattttacttattttagcttttttctacggactgacaacggggtccgtgaaaattacatatagtgatgcttggcagacgctaactggcgggggaagtgacctagcgaaccaattgatttggaacttgcgcttgccgcggttattaattgctttcttagtaggagcagcgctggcgattgctggatgcttgctgcaggcgtgatgcggcatccattagctgacacaggcgtaattgtggtttcagccggtggtggcttcgtggcccattttaatgacattagcatttcctgcgttagcttcctttgtgccgattggtgcgtttttaggggcgtttggaacagctattttgatttatttgcttgcatgggatcgcggtgtttctcctttacgtgtaattttgtctggggtggcgattaatgcgtttattggtgcgatgacgtctggcgtaatggtgctttatagcaaccgggttcaaagtgttatttcttggatgacagggacactttccggaaaaagttggtatcatttggatatgatttggccgtatatgctggtcgggtttgttttaagtggttttgcgattcgttcttctaatgtattgctacttggggatgatgcggcgaaattacttggcttttctgtggaacggcatcgcttttttattataatgttggcggcctttctcagtggggttgcggttagtgtagctggacttattggctttgttggacttgttgtgccacatattttccgtttgatcattggaaatgactataaatacttactgccactatccgcactcggcggggctttattagttggctttgctgatacagcagctagaagttggttcggatccatcgagcttcctgttggaatcc

SEQ ID NO: 3857 - DNA, 7430 bp, Listeria monocytogenes 4b
  misc_feature (1)..(end): n can be any nucleotide: a,g,c or t/u
aaaagaatccccagcgtcagccacattttcgaagcgaataaggtcatttataatgctttgttgttctttatttaaaagattgattttcccgttttcgaattgaacaatgattttttcattttcaattgtttgtttggaaatgctgattaattggtccatttctgtagtaacggctttcacttgcaatgttttgtaaccaagtgcagggattaggccgcttttcaagtagatttctgtacgataataatcaggaacagcaacttctttttcgccttttgcagttacgattactttccgtccaccgtctaatttttcttgatgtacaacgctgaaagtcacttccgcatcacctgagaacagttggaatgatttttcaggagtgaataatgttagttttgcagttctttcttctgccactgggttagtattgaataatagtgcaatattttcgtcgcccatttcctgactaacggccttcgtaatttgttttttcaaaaggttaattaagccatctgtcatccgaagtgcgctagttagccgaactacgatgtcatggtttgcgtcatctgaatttgaagcaccaataccgttatgagcgtggctatcaaataattttttccaaataatatctaaccaaggtttaggatatttgattccgaatttattggccattgttgcaagtggttctagaatgttgactaatctattttctactaagtaattaagacgtttaatatcgtagcgttctgaacgacatgtatggtggattcgtgatttttggcaagcaagcagttcaccagtgatttcgttcgggaaagtagaagtccaagcatcattcataaatgcttcgtaatcggacagaatgaaggtataacctaagtccatctcgttcaattccgcgacaatttctgggaagttttcgcgcacaagtacttggtcgccgcctgctggtaaaagaaggacatctgtatgtgtgttcatttcagcaagtcgatctaaaattggcagaagacgcgtttctacatagcttttttcactgcttaaaaatttgccgggtccataaccgaagaaaatattgttggttgggatggacttgttgtctggagatgtccagtggaagttaaggtcatcttgcacttgatcgttataaacaccacgctggaaaatgctatgctccatattaaatgatttataaatagctggcagataagcatgttgcccaaaaatatctggggaataaccgatactcatgctatggccgaattcttcgcccattttataaccataaagtaagttgcgaatcacagcttctgttttaactaacaagctatcggtttgtgtataccacggaccgacgaacagacgacgatcttggataagtttttcaacgcgcgctttattttctggacgaatatctaagtaacgctcaatgacagacatttgaccatcaaaggaataacttgcaaaggaatcttttgtttctaaaacatttaaaagatagtctaaattctcaattaataagatattggaatcttccatggtgaaataccattcgtgatcccagtgggaatgtgcgacaacatgtacaattttattttttttcattttaaaaacctctcaaattaagtgacaggtactaacgagagtacctgtcagcctatttttttatttgattttattttctttacgtgtgattaagccgtagcgtacgaagatattcgcgaatgtgataaaggcgatacctacgattaaaccaatcgcataggcccagaaattttcaacgagcggccaaccccaaattgctggaagtggaagccattgtactgcaccaagtaaaacggcagtaaccgcaccaagagaagcaccaatcatattaattggaatagtgataagtggattttgtagcataaacggtatcgcgccctctcctatggcaataaaccctaggaaaatagaggttgtacctgcaacacgtaagttttcatcaaaaacacgacgtttaacaacatatttatctaatacagtcgcaagcccaagtccgattggcgggataacgattgctaaaacacgagcagttagcgggaaaattccgtctgctgcgagtccgattgcgatagctccagctgctttattgactggtccacctaagtcaaatgcagtcaaacaagcaataattgtcgaaagtagtacagcacttgcatcttgattttgaataattagttcttgtaaccatgcgtttaagcccccgaataccgggtcgaccacatagtaattgacgaagaacaagactaaaacggtaatccctggaatcaggaacattggtttcatagcttgtaaatttttgtgtaatttaattttttcgtttaagaatttagcaacaaatccggcaatgatacctaaaattagaacaccgaagaatccagatggtataccgccatctatgccccagaaggtgtaatgtagccctgctgcgaaagcaccaccgataaacccgggagcaagtccaggacggtcagcaattgagtaagcaaggaaggcaccgaaaacaggatacatgaatttcataatcatatttccgtataaaccgagataatggaagattacaataagctggttagagtttgttgcatactctggattaccaataactttttcaagaccaaaggcagttgcgccaagttggccaataccaatcattaaaccacctgcgacaataacaggtaacatataagaaataccagttaaaatcccacgataaatttgcgagaaaacactgctcttattattatcaaattgttgttctgaaccatctgtatcagctttgacatagccatctggtttgcttaatacagtttcaatcatttctttaccactacgaagtggctcagcgacacgtctttggataaagggcattccggcgaaacgttctttatcttttgcggtaatatctgtcgcgaaaatgactgcttctgcgcctttaaggatttcaggagtaatgcggtcttcaataccattcgcaccttgtttttcgacgataacttcaataccaagttctttaccagctagttcaagggcttccgctgccatatacgtatgggcgatacccgctgcacatgctgtaatagcaacgatttttcgtgtataatctactttttcatcttcttgttgttcagaatctagcacggttataaattcgtttactgtcggagcggtagaaatgctctcaataaaagcagggtcgagtaaacgcttacttaaagctgccaaaagttctaaatgagttgatccggcttcgttttctggaatagctaataaaaagatatattttacttcatttgttggatcaatgctgccccaagaattaattggttgattgatacgagcaaatgcaaaagcagcttttttaacggctttagatttaccatgtggaatagcaaaacctttctctaaaccagtttcagaaatcttttcgcgttctaagacagcttttttgaattcatttttatctgacaaaactccttgattgtgtaaagcatcaattaatccatcaaatacttcttctttagtgcgccaatctttatctaaaaagatgagtggctccgatgtaatatcgcttaatttcaatgctatcagctcctttattaacagtcttttccctaggttactttagttataccatattatttttttgaacaagtacgaaaatcgtacaattgtacgcagtgttgctcattcgcttttatttcatgtatactaaaactaattcggatagccatggaggtatttattatgtcagctacttcactttatcgcttgtttgcgcctcaaattgaatttttaagtcctgctgaaaaacaagttttcttctatattgacaaccatatttctaccattgaaaaaatgtccctcacatctctagcggagtcaaccaatgtcagtaccacaaccgttattagaatgtgtcataaattaaagctttccggtttttctgagctgaaatttttacttcactcggataaaacagaaacaaaacccctttcaaaagactattcatctacatttttagaaaaaattcgtttaggaattgagcaacttccaaagaaagaaattgagcaagtcgcgacaagaattgcgtatgcacctaaaatctatattgcttgtctaggcatgacgaaaacattaggagaatatttttccaaaagtcttgttacatcgaaaaagaatgtagttttcacctatgattcatttattatcgatattttgccacaaattgttgaaagagatgatttgattattattatttctgaaagcggtggcaccgaaaacaccctttcgctcgcggaacatttaaaatataatttatcgaatgtcattgcgattgtgaataatcccaatgcccagatttcccaatatgtggagacgattatttatgcttccagtgaggagtttgatgaagattcatttaaacatcatcacgccccactgttaattgtgattgacttgattctaaatatttttgaacagcaaaaaaaacttatttaaaatatttttatgaaattgcttgacatgaaacccatttcatcatttaaaactaatatataaggcaatgaaggagacgaatgatatgaaattagatggggtatgcaagattaattagacacttggaatggagtatcaattcggagagttttacatcgatagagactatcttgtttttgaccaagattttagtttgggtatgaaaaaaagacaaacgtttccagttgcaaaattagggcatattgcgctagttcgagaagaagaggaaatcatgctaacatttagctgcgataatattgaattcgaaataaatggaaattcccatgataatttgcgcgaatttcgagatttacttcaaaataaaggcaccaacagcgcagaaatccaaaaagcggaaagtaagaaaaaagcaagatatacaacgcaccattatcacaacttcgctaaatcttgaaggaggaaattatatgtataaagcaataatttttgacgtagatggaacaattctagacacggagagagctgttttgcattctcttcaagcggttttagccgaagaaggattaagttatgaactggacgaattacgatttgtccttggaattaccggagcagctgcggtggaacaattaaacattctggatccagagaaagtattggataaatggattgaacgagaagcaactttcattgaagaagtagaggtgttcgaaggcattcataaagtactgcatgccattccagaaagcggtgttgtcacttctaaaaacgcgttagaaatggaaaaaggtttctatccgtttaatattcaggatcattttcaagcgattgtttgcgcaagtgataccgaaaaccataaacctcacccagatccactgctgaaagggttagaaattcttggaagagagccacatgaagtgctttatgttggtgattcttcgtacgatatgaaatgtgcccatgcggccggagctcattttggcttagcactttggggcgcgaagacaacagatggctttgaaaaagcagaacttgtcttcgaaaaaccagaagatattttagcttatgtaagtaaataagtaaaacccgccaaccttgaatgaaggctagcgggttttttgttataaattattgtaatgctcgttggaaacaggttctaaccaggtcgttccgcctaattccacgtttgtcgaaatggctaagtggacaaaccagctatctttcgtagcgccgtgccaatgtttcacgtctttagggattgttaccacgtcgccctctctgagcaactgggcaggttttccttcttcttgatagtagccagttccgcctgtcacaagtaggatttgtccgccgtcatgtttatgccagttgtttctagctcccggttcaaacgtaacgttcccaatcgggcaattgtaaacagtatcttctgggacaagcatttttaaataagcattaccggtaaagtagtcattagtaatcagttcacctttatcaaaaataacgctgttttcaagtgtactcattatgaattactcctttcaacattaaaatcttttagttcttcttgagccggaatgaggtgggtatcgtaattgtctattttgaagtcaagtcgatcgagcgcttcttgcataacatcaatgcgatttttcagctctatgcgttgctttttcagcaattcggcgcgagcttccagcgtgtgttcgccttctctgaaaagtgccaagtaatcaattaaggcttcaatagacaaaccagctcggcgcatttggcgagtaaataaaatccatcgtaggtcttctgcgccaaatttacgaaccccactttcattacggtggatgggtggaattaaaccaatgcgttcatagtagcgaattgtatcggcagaaacgccacttttttcactagcttctttgatattcatggttaattcttccgaagcatctactacataaaaactaatattatttttggtcatgactattctcctttactgattttctataatgattgtattccttgaagtggactttaagtcaagcgaaaaagcaaccatgatcatttattcatgattgctattatttgtttgaagtgtagatagataagctaagagcaacccatccatcttgcggagcgataagtttgtttgctcataaaatttatccaaacgatattgaatggtatttcggtgcataaaaagctctttagccgtgagactgatgtttccttggtttttaaataatgtgtgaatcagcggaatccaagtatcatcttgatggaaaaggtcgttgagttcattcgtgattaaactttccttcattcgaagcgcgataacttttaaactttcggaagccacggtctgaactacctcacgattattatggttgaaaatggcacgttcttctgcaaataaaccacgcaatcgatcatttaacggatggaaaagacccatgaaaaatgtagattgtatatagaaatcattttcaagcgtaccggcaacggcgattagttcctcttcgccaagcagcgaccccgttgatttttcaataataacgccatagttagtcgaaaacataattaactcagcttctggactgaaaaaactcagcaaagccttttgccactcttgtaacatgtttttagttgtagttgtcttaatatggaactgcgtaatgcgatatgtttctttctcatttgtcatcgccaattccttgtttccaaacaataaatcgaaccaaaattgggtggattctttaggaaatgttggtaatggttctggaaatagcgtatgtaataacatcgcttcttcttctgaaagattgcttttaggaatagtaaaataatacggttcttcgaaaaaagaaatcatatctgaactggattttatt

SEQ ID NO: 3858 - DNA, 5230 bp, Listeria monocytogenes 4b
  misc_feature (1)..(end): n can be any nucleotide: a,g,c or t/u
actaatcgcacataatttttggaggtgccataatggaacataataagttgaaacctttcccaaaagattttctatggggatcagcttctgcagcgtaccaagtagaaggtgcctgggatgaggatggtaaaggaccatctgtatgggatgaatttgttcgtattcctggaacaacattcaaagaaacaaacggagatgtagcggtggataattaccatcgttataaagaagatgtcgcactaatggctgaacagggcctaaaagcatatcgtttctctgtcgcatggagtcgcgttatcccgcatggtaacggggaagttaacgaagcaggacttaaattctatgataatttgattgatgaacttctttcttatggaattgagccagtcgttacactttatcactgggatattccgcaagggcttcaagacgaatatggtggatgggagtcgcgaaaagtcgtagaagatttcactaactacgctgcccttctattcaaacgctttaacggccgagttaaatactgggtaacacttaatgaacagaacgtatttatctcacacggttacaaattagcgtatcacccacctggcgtttctgacgacaagcgtatgtttgcggcaaatcacaatgcgaacttggcgaatgcttctgcaattgctaaattccgcgagctaggtacatccggaaaaattggaccaagttttgcttatggaccaagttactccatcgatgctaacccagcaaatgtattagcttctgaaaactccgaagaattcaatgcccatttctggatggatgtttacacatggggtgaatatccgactgctacttggaactggctggaagagcacggtcttgcaccggaaatcttaccaggcgatacggagcttctgaaaaaaggaaaacctgatttcatgggagttaactattaccgctcaatgactcatgcatttaatgggaaagacggcgttggttctgggaaaatgaatacaactggcgaaaaaggcacttccgaggaaactggtgtaccggggttatacaaaaacaccaataatccatacttagagaaaacgaattgggactgggatattgatccaactggcttgcgcattggcttacgtagaattactaaccgctataaattaccaatcatgattacagaaaatggtcttggtgagtatgatagcttgacggaagaccataaaatccatgatgagtaccgaattgaatacattcgcgcgcatgctctagcaatccaagaagcaatcacggacggcgtagagatgctcggttactgcacttggagcttcacagatttactaagctggttaaacggctaccaaaaacgttacggtttcgtatatgtagaccgcgacgaaaacgatgaaaaagaattaaaacgctataaaaaagatagtttttactggtataaaaagaccatcgaagcaaacggagctaatttagtagaagaacagggcaaataagccttgttctctctgcttcaaccattttgggagggaaattttaatgaaaaaaatattacttgtatgtgcggccggaatgtcgacaagcttactcgttactaaaatgaaagcgcacgcaacctctattggggaagaaattgaaatcgaagcattaccagtatcagaagctagcagcgttgtggacaaaatggatatcgtgatgcttggacctcaagtccgttaccaaaaaccgcaagtagatgaactcgtacagggtcgcattcctgttattgttatcgatatgaaagattatggtatgttaaacgggaaagccgttcttgaaaaagctttcgcggagattggttaagggagattcattcaaaatagggaggttttaaaatgagtataatgtcaaaatttgaacacggcatggaacgtgttttagtaccagttgcgaataaattgaactcgcagcgccatattgcagcaattcgtgatgcatttattttagttttcccattaattatggctggttcaattatcactttgattaacttcgcagtattatcaccagatggctttattgcaaaaatcttattcctagggaaaattttccctaatttagccgatgcacaggctgtattttcgccagtaatgcaaggttcgaccaatattatggccattctgatcgtattcttagtcgcacggaatctcgccatcttctttaaacaggatgatttgctctgtggactgacctcgataggtgcattctttatcgtgtatacaccttacacagtagttgacaatgcatcttacatgacaatcaaattcttaggagcacaaggtcttttcgttgctattattgtagcgattattactggggaagtatttagccgtctagctagatcccctcgtttaatgatcaaaatgcctgaccaagtaccaccagcagttgctcgttcttttaaagtattaattccagttatcatcatcactattcttttctctgtcattaactacttaatcactttaatcgctccagaaggtttaaacgaccttgtttacacagttattcaagcgccacttaaagacatgggaactaacgtattctctgtaattatcatcgggcttgtttctaacttactttgggttcttggtattcacgggcctaacactgttgcggctattcgtgacaccatcttcactgaaccaaacttagataacttatcttacgtagcacagcacggttctgcttggggagctccatacccagcaacatgggctggcctaaatgacggatttgcaaactacggcggatctggtatgactctaggtttactgattgctatctttatcgcttctcgtcgtgcagactaccgcgatatcgcgaaactttctcttgcaccagggattttcaacatcaatgaaccagttattttcggtttaccaatcgtattaaacccaattatggttattcctttcatcattacaccagcaatcaatacattaattggttacttctttatctcaacaaaacttattccacctgtcgcctatcaagtgccttggacaactccaggaccactgattccattccttggtacaggaggaaactggctcgcgcttctggtcggcttgctctgtctagccgtcgcaacagtcatttatctaccattcgtacttgtatctaacaaaattgccgcgagtgatgctgcaatggacaaaaatgcaacagcctcaacagaacaataggatgtgacaaaatgaaaattgcagcttttgatatcggtggaacggcccttaaaatgggggtcgttttgccgcatggtgaaattatactaacaaaatccgccgaaatcagcggtagtgatggcgaccagattttagcagaaatgaagctatttcttgctgaaaatacggacgtgacaggaattgcagtcagcgcgcctggctatgtgaacccaaaaaccggacttattacaatgggcggcgctatccgtagatttgataactttaatttgaaagaatggcttgaagcagaaaccggaattcctgttgccattgaaaatgacgccaattgcgcccttcttgccgaaaaatggcttggtaaaggacaaaatttggatgattttctttgtctaacaatcggaactgggattggcggcggaattttttccaatggcgcattagttcgtggtggtcgtttccgggctggcgagtttggttatatgtttagcgaacgtccaggggctttccgtcctggcaaatatacgctaaatgagactacgacaatgcttgttcttcgcagacaatacgcggaacttactgggcgccctttggaagagattactggcgaagaaatttttgctaagtatgatggacacgacgccgtctcagaacgtcttattactgagttttatactggaatttgtacggggctttataatttaatttacttgttcgatccaacgcatatctttattggtggtggaattacaagtcgccctacttttatcacggagctaaagcatcatgtggagagctttgggctgcgtgacacaattatcgaaacagcaacacataaaaaccaagctggcctactcggcgcagtgtatcactttttacaggaggaaaatagacatgaatgaaatggaaacagtaatttttggcatgattagccaagttggttctgccagaagcagttacttagaagggcttcgtgcggctcgtgaaggcaatttcgaggaagcagaagcaaaactacaagaaggtagcgaaactcttgcaaatgggcaccacgagcatcataagctaatccaaaaagaagcttccggtgaaaaagtggaaatccaattacttttaatccatgcggaagacttactcatcacaaccgaaactttaagagaagttgtcactgagttcgtgcatgtatataaaaaaataagctaaaaaaagcgtgtaggcactgaaacctacacgcttttctattcgtctatttgctcttgattataatttttcttcgccatcgcttccagtaaaaaaagtaccgggatttgcgtcgtaatattcgtcttatcaaccatttcttgagttacataatacggaatattaacatcagacaagcccgcgagcgtattgtggctcgtattggttatactaataatccgactgccatactgctgcatattttgcgcctgctcaagcacctgatccgtctcgcctgacacagaaagaataatcatcactgctttatttttaaattgctctcccgggttaggataaaatggatctttaatataaaaagtccgcttcttcatattggagaaaaaacgactgccatattctgccaaaatccctgaagtcccaattccgaaaaacacgactaaatcggcttcattgatgatctccgccgccgcgtctaacacatgatcataatcacggttcattgttcgttcaaagaattcctctaaaacttccactgtatccgctgtttttttctttacctcacgtgtcgcttcttgttttagcttcactttaaattccgaaaagccttcacagcctaattttcttgtaaatcgaacaatcgaagccggcgagacgtgcgtcacttccgaaagctcgcgcactctcataaacataactttgtcccgattgtccattatgtaccggtataaatgatgctctgtctctgtaaattgtctaatcacttcatacgaaaacataagtttattcacctcatctgtatcagtatttcccgggaaata

SEQ ID NO: 3859 - DNA, 5519 bp, Listeria monocytogenes 4b
  misc_feature (1)..(end): n can be any nucleotide: a,g,c or t/u
aatggtgaatgggtcgagagtatggcggacaaatacgaagatgtcatcaatccggcgacgggggaagtgctgtgccaagtgccgatatcgacacgcgcagaattagatcaggcggctgtcattgctgaacaagcttttgaaaaatggagccaagttgctgtaccaagacgtgcacgggttctatttagtttccaacagttactcattcaacataaagaagaactagcaagactgattacactcgaaaatggtaaaaatttatccgaagcacgcggtgaagtccaacgtggtattgaaaatgtcgagttcgcggctggagcgccaacactaatgatgggtgattcgctggcttcgattgcaaccgatgtggaggcggcaaattatcgctatccggtcggggttgttggtggaatcgcaccatttaacttcccgatgatggtaccatgttggatgttcccaatggccattgcgcttggtaactcgtttattttaaaaccatccgagagaacgccacttttaatggagaaattggtggaattattttctgaagcgggtcttccaaaaggtgtattcaatgtagtgtatggtgcgcatgatgtggttaacggaattttagaaaacgaaataattaaagcggtttcttttgttggttctaagccagttggtgaatatgtatacaaaacagggagcgcttatttaaaacgagtgcaagccttaacaggtgcgaaaaaccatacaattgtgcttaatgatgcgtatttagaagataccgtgacgaatgttatttcagcggcattcggatcggcgggtgaacgttgtatggcatgtgcggtcgtcacagttgaagaaggcatcgcggatgagtttctagcggcacttcggacagcggcgcaaaatgtgaaaattggaaatgggttagacgatggcgttttcctcggtcctgtaattcgcgaagaaaaccaaaaacgcacgattgcttatattgaaaaaggcttggaagaaggcgcgaaattaacagtagatggtcgggaaactggactttcagaagggcactttgttggtccaacaattttggaagatgttacgacggatatgacgatttggaaagatgagattttcgcaccagttttatccgtgattcgtgtgaaaaatctccaagaagctgttcgggttgcgaatcaatctgaatttgcaaatggcgcttgtattttcacaaataatgccaaagcaattcgctactttagagaaaaaatcgacgctggaatgcttggtgtgaatttgggcgtacctgctccaatggcgtttttcccgttttctggttggaaatcgtccttttatggaacgcttcatgctaacggcaaagacagcgtggatttttacacgcataagaaagttgtcactgcgagatattcattaaaaggttacgaagaataggagggcgcaaaaatgggcaaactgttacgaaaaccgttaaatgaaagaatagcgcctggcattacgtttgtgcaggatattaaccaagctaattctccgctaagttatgttggttttcgcttaattgaaatggaaaaaggtgctatttatcaggaggagcttactgatttagagtgttgtattgttgcgcttactgggaaaattacagtgagtgagggtgacaatatttttgcggagattgggacaagagcgaatgtctttgaaaaaattccgacagatagcgtgtttatttctggcggacggacgtttcaagtgaaggcggacacagaaaaagctcgtgtagcgctttgctactcccaggcgaatcgagacttgccaacgacacttattaaggctagtgataattcgattgagcagcgcggaaaatatcaaaataaacgactggtacataacattttgccagatgtaagtgaggttgcgagcagtttgttggttgtggaagtgtatacggatggcggaaatttttcgagttatccgccgcataaacatgaccgcgataatctgccagcggagtcgcttttggaagaaagttattatcatgaaattaatccggagcaaggttttatttttcaacgtgtctatacggatgaccggacgcttgatgaaacgatggctgtggagcatcaaaatgcggttatcgttccagaaggctatcacccagttggcgtgccagatggatatgattcatattatttgaacgtaatggctggaccgaaacgggtttggaaatttcacaacgatccggaccatgaatggattttagaacgagactaagaggaggatttggagcatgaatctaaacaaacatagcgaacgaaaatttgatttaatcacagtaggacgcgcttgtattgatttgaacgcagtcgaatacaatcgtccaatggaagaaacgatgactttttctaaatatgtgggtggttccccggcaaatattgcgataggaaccgcaaaactaggcttaaaagtaggctttatcggcaaaatttctgctgatcaacatggtcgttttattgagaaatatatgcgtgatttgagtataaatacggacggaatggtgaaagatacggaaggccgcaaagttggcttggcgtttacggaaattaaaagcccagatgaatgcagtattttgatgtatcgcgaaaatgtagcggatttgtatttaacgccagaagaaatttcggaagattatataaaagaggctcgcgtgctgctcatttctggaacagctttagcgcaaagtccatcgcgggaagctgttttaaaggcagttagtttagctcggaaaaatgatgtagccgttgcttttgaattagattatcgcccttatacgtggacaaacaccgaagaaacggcggtttattattcacttgtcgcagaacaagcggatgtgattattggcacgcgcgacgaatttgatatgatggaaaatcaagtcggtggcaaaaatgaagcaacaaaagcgcatcttttccaacatcaagcagaaattgttgtcattaagcatggggtggaaggctcattcgcatatacaaaagcgggagaaacattccaagcaaaagcatataaaacaaaagtgctcaaaacattcggcgcgggagattcctacgcatcagccttcttatacggtttatttagcggtgaaagtatcgaaacagcccttaaatacggaagtgccgcggcttcgattgttgttagcaagcatagttcctcagacgcgatgccaacagctgatgaaatcaaagcgctcattgcgcaagcggaataggaggagattatggtgactgaaaaaacgattcgactaacaaccgcacaagctttggtaaaatttttaaatcagcaatatatcgaagtggacggcgaaatggcaccgtttgtggatggtattttcacgctgtttggacatggaaatgtggttggtatcgggcaagccttggaagaagccccaggtcatttaaaagtgtatcaagggaaaaatgagcagggcatggcgcacgcggcaatcgcttatgcaaaacaaaaaaatcgccagcgcatctacgcgtgttccacatcagcaggaccaggttccgcgaacttaataacagcagccggcaccgcacttgcaaacaatttacctgtgttattcctgccggccgacacattcgcaaccagacagcccgacccagttttgcaacaattagagcatgagtcgagcacggcaattacaaccaatgatggcttccaagcagtctccagatattttgaccgtgtgcagcgaccagaacaactcatgagcgccctgattcgcgctttcgaagtaatgaccaacccagcgagcgcgggaccagcaacaatctgcattgcgcaagacacagaaggagaagcattcgattatccagtcgaattttttcaaaaacgaattcactatcttaatcggcaaatcccgacaaagcgtgaactaaccgaagcagcgcgactcatccaagcgagcaaaaccccagttatcatcgtcggaggtggcgcccgctattcaagagcacgcgaagaattaatcgccctttccgagcaaaccaacattccgctcgtcgaaacacatgccgggaaatcaacgcttgagtttgacttcaaaaacaacctaggtggcacgggaatcctcgggacgcttgctgccaataaagctatccgtgacgccgatttagtcatcggaattggcacgcgctataccgatttcacaaccagttccaaaacggcattcgatccaacaaccaaatttatcaatatcaatgtcagccgcatgcaaacatacaaattagatgccttccaagtggtcggtgacgctagagcaaccctagctgaactcgcaccacttttacaagattatcagactcaatttggaaacaagatagccgcatacaaaaccgagtggctagacgaaagagcacggctacaaaccaccaaattcaaccgagaagcatttacgccagaaatcaaagatcaattcgaccaagcgaccttaaacgaatatgcagaccgcttgcagaccgaatttacgcaaacagaagcacttatcacaattaatgacaacgtggcaccggatagcattgtcgtttgttcggccggttcacttcccggagatttgcaacgactctggaacccagccgtaccagacacctatcacttagaatatggctattcctgcatgggctacgaaataaacggtgctctcggcgcgaaaatggccgcagcaaaaaaacaagaagtatacgccatcgttggcgacggcagcttctgcatgtcacactcagaactactaacatccttacaatacggcaaaaaaattaacattatgctcttcgataattccggttttggctgcattaacaacctccaaatggcaaacggcagcgacagttttttctgcgaattccgcgatagcgacaaccaaatcatgcaagtcgattacgccaaaattgcagaaggatacggagcaaaagtctatagagccaacacgaaagaagatttaatcagcgcactggaagacgcaaaaacacaaagcaaaactactttgatcgaaatgaaagtactaccaaaaactatgtcagaaggctatcttaattggtggaatgtgggagtttccgaagtttcaaacaaagaaagtatcaagcaagcatacgaagaaaaacaagcaaacctgaaaaatgcccgactatattaagcaaaacaaaaacaagtccatcaccggacttgtttttgttttgccacttcaatagccccgccttgcatcacaccagtttttctttataataaaaagtaactgtaagattatgttttttaggaggaaataatatggaagtttttgcagaatatttagctgaaattgaaaatccggatcaccgcgcgagaacacaagaagttttaacatgggtggcggaaacttttccagatttaaagccagaaatcaaatggaatacaccgatgtttacaaataatggcacgttcataatcggcttctctattgcaaaacagcatatgagcgtttcccc

SEQ ID NO: 3860 - DNA, 6780 bp, Listeria monocytogenes 4b
  misc_feature (1)..(end): n can be any nucleotide: a,g,c or t/u
acgccactcagcaacttcctcctgctcgagcgccgacatgtgctggaaagaatcgaaaaatttgctgctacttctaagcaaattacagagactttctacgttccaagtttatccacaagaacggttatttttaaaggaatgttactaccagaacaaattaatcaatactatttagatttagcagatccagcatatgtatcggcttttgcgctagtgcattctcgtttttcgacgaatacttttcctagttgggagcgggcgcatccgtatcgatatttaattcataacggtgaaattaatacgcaacgtggtaatgtcaactggatgaaagctcgggaaaaaagagcagaatctgatttacttggagaagatttagccaaattgctaccaattattgacgaaagtggtagtgattcggctactttggataatgccttagaatttttagtgcaggcaggccgttcgttacctcatgcggcaatgatgcttattccagaaccatgggataaaaatccgcatatgacggatccgaaacgtgctttttacgaatatcatagtacattaatggagccgtgggatgggccgacatccatttcctttacgaatggtcgagttattgggacgattttggatagaaatggcttacgtccggcgcgttattatgaaacgaaagaccatacgattatttattcttcggaaacgggcgttgtgccagtggattcgagtgaaattattcgcaaagaaacggttggcgcgggaacgatgttgttaattgatttagaagaaggacgaattgtgacggatgctgaattaaaagaagaactaacaacggaaaaaccgtaccgtgaatggttggaagcagaaatgacagaaattgccgatttagcaacagccgatttacattatgaagcaatggataaatcagaacgttttaaaaaacaacgcgcatttggttacactcaagatgagttaaataaaattttgattccgatggtaacacagaaaaaagatccattgggcgcaatgggttatgacgcaccacttgctgttttaagccaacgaccacaagtgttatttaattactttaaacaactttttgcgcaagtaaccaaccctccgattgatgggattcgcgaagaaacggtgacttctgcgatgacgttacttggtgatgaaggtaatattctaaatccaactgctcaaaatgctaaccggattcgcctgaaaacaccaattttatctcgaaaagaatttgcggcacttgagcaacaaacaaaatttgcccaaccgactgtcactttaccaattttatttaaggcagaggaaagagatggtttagaagctcgcttagaatcattatttgtagaagcagatgaaaaaatcgcagctggggcagaattgctcattttatcagatgatggggtaaatgcggattggattggcattccttctctcttagctgtcagtggattacatcatcatttagttaaagctgggacgcgtacacaagtgagtattgttgtgaaaacagcggaagcgagagatgtccatcaatgtgcgctcttaattggttacggggcagacgcggtatttccaagtcttgctatcgatacgtttgacggcttgattaaagaaggacggatgaaaggatttacacttgatgaggcggaaagtcgttatattgaagcaattacagatggaattctaaaaatcatgtccaaaatggggatatctacagtgcaaagttaccgtggtgcccagatttttgaagcaatcggtattggtgatgatgtaattaaacattatttcccgggaacagcctcgcaaattggcgggattccactggaagttatcgcgcaagaagcttggctccgtcatcgcgaagcctatcatgatatcggctaccagagtttcacgcttaatacaggcggggaatatcagtggcgctcaaacggagaatatcatgtctacaatccactagcgattcattctttgcaacaagctactcgagaaaatgaccgtgaaacgtataatctttattcagatttaatgcaaaatcaaaataatgcctttttaagaggattactcacttttacaagtgatcgcaagccgattccactggacgaagtagagccggccgaagccatttttaaacgatttaagtctggcgcgatgtcttatggttcgattagtcaagaagctcatgaagcgcttgctatcgcaatgaaccgtatcggcgggaaaagtaatagtggggaaggcggcgaaaacccgaaccgatttaccccggacgaaaatggcgattggcgtagaagtgctatcaaacaaattgcatctggtcgttttggtgtaacaagccattacttggtcaatgcagaggaactgcaaatcaagatggctcaaggagcgaaacctggtgaaggtggacacttgcctggaaataaagtctatccatggatttcgaaaacgcgtggttcaacaactggtgtaggattgatttcaccaccgccacatcatgatatttactcgattgaagatttgtctcaattgattttcgatttaaaaaatgcaaatcaaaatgcacgtatcaatgtgaaactagtttcgaaaactggtattggtacgattgctgctggcgtagcgaaggggaatgccgacgttattttagtaagcggttatgaaggcggaactggtgcggcggcaagaacaagtatccgtcacgcgggagtgccgtgggaaatcggcttagctgaaacacaccaaacgctcttgctaaatggacttagaaacaaagtcgttgtcgaaacagatggcaaactaatgacaggaaaagacgttctggttgccgctatgctcggcgcggaagaatttggttttgcaacggcaccactcgtaacacttggttgcgtcatgatgcgggtttgtcacttggatacatgtccagtaggtgtagcgacacaaaatcctgagctgcggaaaaaattcagtggttcggcagattatgtcgtgaacttcttccattttatcgttgctgaaatgcgcgaaatgatggcggaacttggctttagaagtttaacagaaatcattggacataaagaatttttaactactcacgagaaaaaagaagcacattggaaagcaaaatatatcgacttttcgaatatgctttatagtgatgatttttataaaaaccaagtccaatattgcacaaaacaacaagaccacaaaatcgaccaaacgcttgatatgcgcgaacttgtgccattaattcagccggcactagaaaacggtgaaaaagtaactggaactttcgctgtacgaaatgttgaccgcgcgattggaacggttgctggctcctttattagcaaaaaatatggtgcagagggattgccggaagataccatttcacttgattttgttggttcagctggacaaagcttcggtgcttatacgcctcttggcatgacgctccgaattcacggtgacgccaatgattacttcggaaaaggactttctggtggcaaattgattgttagtccagatgctaaaacacctattaaaccgcatgattccgcgattgtcgggaatgtaacgctttacggtgcaactggtggttatgcctatgtgcacggaaaagcaggtgcacgtttcgctgttcggaatagtggtgcgacagctgttgtggaaggcatcggtgacaatggttgtgaatatatgacaggcggtgcagtagttgttctcggtgaaattggtgagaactttgcggctggaatgtctggtggagttgcttatctttatacaaacaataaacaagcgacgacagccaaaatcaatcatgaactcgtaaacagccgttctactttaaatacttccgaattaactaaattaaaacagctgattgaacaacacgcaaaccttacaggaagcaattttgctaaagatattctgcaaaattgggaagcagagaaagcgaattttattttcgtcattccaaatgaatatgaaatgatgctgacgagaatcacgacgcttgaacaaactggaaaaacacatgatgaagctgaattacaagctttttatgaacataaagacggaaaattagttgccggagtggcgaaatagagaggagtgaaaccatgggaaaagcaactggatttatggaatatgaccgaattccctctccaggacgtgatccgaaaagccggacacgtgactggaacgaatatagtttaccaatgccggtagcagatttaacattacaagccgctcgttgcatggattgtggcgtaccgttttgtagtgtaggaatggaaattaaaaatggtgtttcaggctgtccgctgcataatttaattcccgagtggaacgatgccgtttatcggggtgactggtatgaagccttacaactactcttaaaaacaaataattttccagagtttactggtcgtatttgtccggcaccgtgtgaaggtggctgtacggtggcaatttcggaacctgctgtagggattaaatccatcgaaaaagcgattattgaccgaggttttgaagaaggctggattaaaccggctcctcctaaaaaacgtaccggtaaacgaattgctgtgattgggtcaggaccggctggacttgcctgcgccgatcaattaaataaagctggccatagcgtaacggtcattgaaaaaagtgatcgcattggtggcttattaatgtacggtattccaacgatgaaactggagaaagaacaagtaacgcgccgagtgaacttgatggcggaagaaggaatcgaattcgtcacaggtgttgcagcagggacagatgttacttttgcagaactacgagaagagtatgattctatcgttcttgcgacaggagcagggaatgcgcgcgatatcccacttgctggacgtgatgcagttgggattcacttcgctgttccgtatttatcgcaaagtacgcgtgataatctggataacggcggggtacaaacactttctgctaaaggtaaaaatgtggtgattatcggtggtggagatacaggtgctgactgtgtggcaactgcgctcagacaaggggcaaaaagtatttatcaattcggtattcaagataaactacccgaattgcgtgatggcgaaaacccttggccgcaatatccacgtgttttcaaaatggattatgcgcacgaagaagcggaagcagtgtatggaagagatccacgtgagtaccttattaatacaacttcttttgaaaaagatgaagcaggaaatcttattggactgcatactgtagaagtagaagaaaataaggcagaaagaaaatatacacctgtagaaggtagcgaaaaatactttgaagtagatatggttctaattgcgattggttttgcaggaacaaccgaagatatttttacaaactttggtgtaggaaaaacagagcgccatacgatagatgctgctaaaggattttaccgcacaagcgaagagggcgtattcgcttgcggagatgcgcgtcacggtcaaagtttagttgtaaccgcgattgcagaaggacgagaagcagctcgtgaagtagacttttacttgatgggtgaaacatttttaccataataaaaaagagcttatcctaaatgggtaagctcttttttgactaattatttcattccagaaacgttgaagccttttaaaatgtacttttggaatgtcatgaaaatcaagataattggaataaccatgaaggttgctccggccatttgtaaggcgtagttgctgccatattgaccttttaataattgaaggccaactgatagggtgtagaatttttcgtcgttggcaatgattaacggccataagaacgagttccaaccagcgatgaaagtaagaataccttgtaccgcaagcacagggcgggaaatagggataactatccgccagaaaatataaaattcactagcgccatcaagtcttgctgcttcgagtaaatcatcggatatggtggacataaattgacggaataagaaaattccgaatgccccaacaagtcctggaagcacaatccctgtcatcgtattcgttaatccagccgcattaagcagcaagtaaaccggaatcattgttacttgtcctggaatcatcattgtagcaagaacaagataaaataacttgtttttccctttaaatttaaatttagcaaagccgtaacccgccatcgcatttaaaaataaaccgaaaaacgagaagaacacaatgattaacgtattttttaagtaaatagcaaagtccatttcagtaaatagtttggtgaaattatctagtgtgaaagtttctggccaaatagtaggtgggatttttaaaatttcagcatccgttttcaaagaggagagaaccatccaaatgaacggtaaaatcataaagaatccgccaaccgttaaaattgtaattacggcaatttgagcgccgcgcgatttttgtctatattgattcatttataaacactcctctcttaaatatccccatcattatttttgcgctgaatccggaattgaataatcgtgataataataatcgcgataaacaagatgaacgatccagcagcggcataaccaaatttacttaattggaaaccgttttgatagataaagagggcgacagagttcgtactatcaagtggtccaccttctgtcataacgaacggctcctcgaagaattgcaaccaaccaatcatcgttgtaactttccagcacaggtcggccgctcaagcatgcgatgganagtgcctacaagt

SEQ ID NO: 3861 - DNA, 6505 bp, Listeria monocytogenes 4b
  misc_feature (1)..(end): n can be any nucleotide: a,g,c or t/u
attaaaaacggtcattacccacaacttttaaaacataagacgcttgggatgatttttgaacaatcatcaacaagaactcgtgtatcttttgaaacagcaatgacacagcttggtggtcatgcgcaatatttagctcctggacaaattcagctcggcggacatgaatcagtaggcgatacagccaaagttctttctaggcttgtagatattttgatggcgcgtgttgaacgtcatcaaacggtagtagaacttgcaaacacagctgctattccggttattaatgggatgagtgattacaaccatcctacacaagaattaggtgatgcaattactatgttcgaacaccttccaaaaggaaaaaagattgaagactgcaaaattgtctttgtaggagatgctactcaagtatgtgcatctacaatgtttatggcaacaaaacttggaatggatttcgttcaatttggaccaaaaggatttcaattacgtgaagaacatttgaaaatcgctgaagaaaattgcaaagtatctggcgggagctatttaattacagaagatgtggacattgcgttaaaagacgcagatttcatttatacagatgtttggtatggcctatacgaagcggaactttccgaagaagagcgaatgaaaactttttatcctaaatatcaagtgaataaagaattgatcagtaaagcggctccacatgtgaagtttatgcactgtttacccgcaactcgtggggaagaggttacggacgaagtgcttgatgctccatactcagttgttattgacgaagctgaaaatcgtttaacagcgatgagagcactgcttgtatactttatgaatccgtatgtgagagaagcgggttttgcagttgcggaaaaatatgatgcagaactagagttattacttagaaatggcgctggcttataagataccaaaataaggaggagaagagagcgctggccgttttcttccccccacttaaaaagaggagtgggcattttggaaaaaaagaagaaattcagattatttgatgcggttcttatggctgtatgtgtcgttttagttgtggaatctgccgcgccagcagcggcgataggatcatctcaatttttctggtggattgcgttacttattttatttttcttaccatatggacttgtttcggcagaacttgggacaacctatgatgatgaaggcggaatctatgattgggtaaaacgggcatttggccgaaaatggggtgcgcgtgtcgcttggttatactggattaattatccgatttggatggcgagtttagcggtattgtttgtagaagttattacgcaaattttcccggtttcatttgggacgccggtttcgattttgattcagctcatttttgtgtggattgttgttattattagttgttatccagtgagtgatagcaaatggattcttaatatcgcagctttctgtaaagtggcaattatgctttgccttggtgtacttggaatttattttgcgatgacgaagggattggcgaatgatttctctggaaaagcattacttccaacttttgatttagagagtttgtcatttatttcagtcattttatttaatttcttaggttttgaagtggtaacaacgcttgcgagtgacatggaaaatcctaaaaaacaaattcctcaagcaatcatttatggtggggttttgattgcattcttctatttactagcagctttcggaatgggggcagcaattccgacttctgaactttcaacatccggtggtcttattgatagctttattatgctgattggcggagttaacccatttgttattattattgggattatgtttatgtatacattagtagcaaatttagtctcttgggcactaggcgtgaattatgtagcaatgtatgcagcgaaaaacaaagatttaccagctgtttttggaaaaacaaatccgaaaaatgatatgccaacgggtactagtattttaaatgggattgtagcttctgtattaatcgttgcggcaccacttattccaaatgaaaatattttctgggcattctttgcattaaatgtagttgctttactaggttcatatatcctaatgtttccagcatttttgaaattacgtaaggtggatccggaccgagaacgtccatttaaagtgccaggtggcaaaatcttgctttacttaatgactttcgtaccaatgattttactcattattactttgattttctctgcagtaccattaaatggttcaagtgcagaattaaatgaaaaaatcccaatcttaattggaaccgttgtagcggtgattgttggtgaaatatgtatttggcttgctgggaaaagaaaagacaaaggagagataggaaatgagaacgattgatagttcttctaaaaaagatggatttagaatgcctggggaatttgaaaaacacgctggttgctatattatttggccagaacgaccagataattggcgcttaggagccaaacctgcgcaaaaagcttttgttgatgtggcgacagcgatttcccgttttgaaccagttacagttgttgcaagttcaagtcaatatgtaaatgcgagatatatgttgcctgatgaaattcgcgtagtggaaatggataacgacgatgcttgggtgcgcgattctggaccaacttttgtggtcaatgattctggtgacgtacgtggtgtggattggtcatttaactcttggggtggattggtcgatggtttgtacttcccgtgggataaagatgatcaagtcgctcaaaaaatatgcgaattagagcgaaaagatcgttatcgcttagctgattttgtgttagaaggaggttccattcatgtcgatggtgaaggcacgcttgtaacgacagaagaatgcttattatcagaaggtcgcaatccacaactttcaaaacagcaaatcgaaatggttttaaaagagtatttaaatttagaaaaaattatttggttaaaacgaggaatttatttagatgaaacgaatggtcatgtagataatattttcaattatgtacgcccaggtgtagtagcgctcgcgtggacagatgatgaaactgatccgcagtatgaaatttctaaagaatgctttgatattttatcgaatgaaaccgatgcaaaagggcgcaaattagaagtgcataaaataaatgtaccaaaaccaattttaattaccgatgaagaaagtaaaggtgtagatgctgtggaaggaacgctaccacgggaagaaggcgaccgactggcagcaagctatattaattactacacagcgaatggtggagtggttttcccgctatttggggatccaaatgatgaacttgcccgcgaaaaattacgtcaactttatccaaactgtgaagtggttggtgtgaaagcaagagaaattttacttggcggcggaaatattcactgtattactcaacaggtgccaagaggataaggagtgaacagcatgaatcaaaaaatagtcgtggcactaggtggaaatgcaatattatcgagtgatgccagtgctgaagcgcaacaaagtgcacttgaaaaaacagccgaatatttggtgcaatttatcgaaaacggggatgatttaattatttcgcatggaaatggaccgcaagtaggcaacctgatgctgcaacaacatgcgggagcttctgaaaagaatccagcaatgccgcttgatacgtgtgtcgcaatgacgcaagggagtattggctactggatgcaaaatgcgttagataaagcatttttaaaacacgggctagataaagtagcggtttcattaattacacaagttgttgtggataaagatgatcctgcttttaaaaaaccaaccaaaccaattgggccttttcttactaaagaagaggctgaaaaggaaatggcagaaactggtgcaatatttcttgaggacgctggtcgaggttaccgtaaagttgtaccatctcctcgcccgcttagtattaaagaacatcaaattattaaacaattggttgatagtggtgttgtgactatttctgctggtggaggcggagtttcagtcgttgaaaatggccttgatttatctggggtagagactgtaatcgataaagattttgcttctgaaaaacttgcagaactaattagtgcggatttgttggttattttaacaggggtggaaaatgtttatatcaattataatcagccaaatcaaaagaaacttgaaagagttaccgtttcagaattagaaaaatatattgatgagaaacaatttgcagcaggaagtatgttgcccaaaatcgaagcagcaacagcttttgtcaaagaaagaccaaatgccaaagcaataatcacctcgcttgaaaatattggcgccatgctagaacatggggcagggacagtgattattgcgggctagtagaatagggcgaaatccgggtacttgttactcggtttttgtcttgtaaaacagtatttcatgtataatgtggttatgaagtaataggaggagaatgaggatgggacaactgaaagggttgccggtagaggacggattcagaatgccaggagaatacgaacctcatattggctgtttcatgatttggccagaaagacctgataactggcggcttggtggaaagccagcgcaacaaaactataaagaagttgcagtcgctatttcaaattttgagccagtcactatgtttgtatcaccaaatcaatataaaaatgctcgtaaagaacttccggataccattcgtgttatcgaaatgagtaatgatgatgcgtggatacgcgattatggaccaagttttttggtgaatgataagggggaaatgcgtggtgttgactggggatttaatgcttggggtggtcttcttgatggtctatattttccgtgggataaagataatcaaattgcaaaaaaagtttgtgatttagagcgacttgattactactcacagaaagattttattttagaaggttgttccattcatgtagacggtgaagggacgctggttacgacagaagagtgtctgttatcagaaggaaggaatccgaatttaaccaaaatagaaatcgaacaaactttaaaaaaatatttccatgcacaaaaggtaatttggcttaagcatggcttctatcttgacgaaacaaacggacatgtagataacatttttaactttgtggcacctggcgaagttgttttatcgtggacggataacaaaagtgatccgcagtatgaaatttcaagagaatgctatgatattttagctaaccaaacagatgctaagggaagaacttttatgatacataaactacattgtccggatccagtacttattacgcaaacagagagcgaaggtgtggaggcgattaatggaactttccctagacaggctggagatcgattagctgctagttatgtaaattactatacagcgaatggtgctattattttcccattgtttgatgatccaaaagataaagatgcgcaggaattacttgaacagttatatcctgatagaaaaattgtggggattaaagcacgtgagattttgctaggcggcggaaatattcactgtatcacgcaacatctccctgataaaagtacgatacgtgaataaaaaggagacttgaagtatggactttttcgaaatttccagtaagactgtagcttccctaactcggaatgagcggattttatttgactatgtcgttaagaatatgaatttaattaaaaatcaaagtattcgagaagtttctgcagaatgctttgtttcaacaacaacttttttgcgttttgtaagaaagcttggatttactggttatagcgagtttacaacagtcttaaagttcactttacttgggcatacagagctaaaaccgtccccatttgtcgtagaacagtcggattatcgtgaagaatatttgaaaaacattattgaatctgtccgagttttagaaccaagtaaaatcaagaaaatcaccaaaaaactagtaagcaaaccgcgaatttatttttttgctaaagggctgagtaaacatgctgcgaaatacatcaaatatctctatacaatgagcggatttttggtagagtttcctgaagattatcagtatcgccaagctgtattgccgcatattggtaaagatgatttagtttttatccttacgtacggtggacatgacattgaattaatccaaactgcccaaaaactaaaaagcagaaatgaaacgcccatgttgatttcgattactggggctgataataatattattcaaaatatgagtgatattaatttatatatttttacagatgaaattgaaatgaataatctagaattacccttctggcctctctactatcgctagtatggctggcgtctttttcttccccgcttttggaggaaaagaaccctcggccttttaaatgtgtcaaaatttggaaaaatacgcgcccaagtctgttccagggacacttgacttgggggaaaat

SEQ ID NO: 3862 - DNA, 7554 bp, Listeria monocytogenes 4b
  misc_feature (1)..(end): n can be any nucleotide: a,g,c or t/u
agaaattatgcaacaattaactaaatgggatgagactatcccagcaattcaattttctacttcgttaattcccatcacaagaggaatcttcacaaccatctacgttaaacccaaaaatcctatcacccaaaaagagttacatacgctttacaaatccacctacgagaatgctccatttgtccgaatccaaccagaaaatgtatatcctactgtcaaacaagtgacagcatcgaattactgtgatataggtcttgcttataatgaaaaaacgaatgtgattactatcgtttctgtgcttgataatttagttaaaggggcggctggtcaggccattcaaaatttaaacataatggcgaattttgctgaaagtgacggattaaggtttattccggtgtatccgtgaaaggggaaaaataaaatggaacttgtcaaaggaaatatcgcttcaccaaaaggattttatgctgacggaaaacatgcagggcttaaaagaaaacgaaatgatattggttggatttattcagaagttccagcaaatgcagccgctgtttatacgatgaatcaaatgcaagccgcaccaatttttgtaacgaaagattcttttcaaagtaatgcgaagttacaagcaattattgtgaatagtgggaatgccaatgcatgtacagggaatcaaggtatgttagatgcacttgcgatgcgggctcaaacggcagaaaagttagatattccacttgattacgtagccgttgcttccacgggaattattggcgatatgctaccgatggacaaaatcaacgcgggaatagaaatgctagaaaagcaaactggaaatgcggccgattttgaagaagcgattttaacaacagatacgtttcaaaaacaaatcagttttcaaacagaaattggtggtagaaaggtaacgatgtcaggtgtagcgaagggatcaggaatgattcatccaaatatggcgacaatgcttgcttttattacaacagatgccgcaatcccggctgaattattgcaaaaattactaaaaataaaagtagacaaaactttcaatcaaataacggtagatggcgatacttctaccaacgatatggtggtagtcatggcgaatggctgtgcagaaaacccgatgcttcaggaagggacagcggattttgcgaaatttgcggatatgtttcaagcggtaacggagcaccttgctaaaagcatcgcgcgagacggcgagggagcgacaaaactaatcgaggtacaagttaatggcgctacaaaaacagaagatgcaagaatgattgctaaaaaaattgtttcctctagtctcgtgaagacggcagcttttggtggagatgggaactggggacgtattatttgcgcgattggctattcaggtggccggtttgcgccagataatattacgattaaaattggcgggattgaaattctgaatcatagcagccaaaccatttttaatcaacaggcgttagatgcctatttagaagaagagcatatcattatcgacgttgatcttcatatcggacttgagtcaggaacagcatggggttgcgacttgagttatgaatacgtcaaaattaacgcatgctaccggacgtaaggaggaatcaggatggagaatacgatagtcgtaaaactaggcggtgtcgcaagtgacaatttaacagaagattttttccaacaaataatacaatggcaagctgccaataaaaaaattgtactcgttcatggtggtgggcattatattacaaaaatgatgaaatctcttgctattcctgtcgaaacaaaaaatggtctacgtgtcactaataaagcgactcttgaagtgacaaaaatggttttaattggccaagtccaaccagctattaccactgcttttcaaaaacgtaatatttcggttatcggtttaaatgcgggtgatacagggttactagaagcagattttttgaacgacgcgaatttgggatttgtcggaaaaataacgaaagtaaagacagatttaatcgaacaattacttagcgaaaatattatcactgtgattgcgccgcttggtataaacagtgaatacgattggctaaatgtcaatgcagatacagccgcctgtgaagtagcaagcgcacttcaagcagaagcactctatttactaacagatgtacctggtgtgaaaaaaggttcagaaattattggcgaaatagccacagatgaaatagaaaagctgcaatatgccggcgtaataaaaggtggaatgattcctaaattagctagcgctgcctttgctgccgaaaacggtgtcggaaaagttattattacagattcccttaacactagcggaacaaaaataaaaaacaaggtggcgattggatgaaacatgtttttccaacatacaaaaggtttcctattgatttagttaacggtacgggcacggttgtaacagataaaaatggtaaaacatatctcgatttcactagcggtatcgcagtttgtaaccttggtcattgtccagcaaatgttgcagaagcagtacaacaacaactaacgaatatttggcacacatcgaatttatatgaatgtgctttgcaagatagtgtcgcagaattaattgcagatggtaaagacagattagttttcttttgtaatagcggaacagaggcaaatgaagcagcgctcaaattagctagaaaatataccgggaaagaaaaaataattacctttgaaaaatctttccacggacgtacttttggttcgatgtcagctacagcccaagctaaaattcatcaagggttcgggggacttgttcctggcttcacttacgtcccttataatgacatcgaggctttccgagcagaaatcgatgaacatacagcagcagtcatgttagaagtaattcaaggggaaggtggcgtcatcccagcaaatgcagcctttcttttagaggttcaattgctttgcaaaaaaatgggggtattattaattattgatgaggtgcagactgggcttgggcgaacggggacgctttatggatttgagcagattggtttagaaccagatattttcactttagcaaaagggcttggaaatggctggccgattggagcgatggtcggaaaagcgaatctaagtagtgcttttgggccaggaagtcatggctctacttttggaggaaataaattggcccttgcggcggctaaagagatattacgaacaatgaaacaagcgggatttttagaagaggtaaatgccaaagcagactattttagatatttgttagaagtgcatttagaggcgttggataatgtttctgtcattcgtggtggaggatttctgataggtatagaacttgaaaataccgcagaaccagttgtaacggaacttagagataaaggattgctaatactaactgcgggggctaatgtgctacgaatcttaccacctttaaccgtcagttatgcagaaatcgatcaagccatatatttattgaaaagtgttttggaaaaccaattgattgggagtgaagagggatgacaatgtatgcgaaaaataatacagctgggaaagatatgctcagtttgcttgaatggaataaagaagaattgacagatattattaaattagctgttgcaatgaaaacgaatccagctcattatagtcatattttaagcgggaaaattttaggaatgatctttgacaagccttctactagaacacgggtttcttttgaagccgggattctgcaattaggtggacaagcgatagtgatgagttcaaaggaattgcaaatcgggcgtggtgaaccgattaaagatacggcgcatgtgatgtcagaatatattgatgcaattatgattcggacatttagtcatgaaaaagtagaagaattggcgtatcatgcagaaattccaattattaatggcttaaccgacctgcatcatccatgtcaggcgttagcggatttaatgactatttatgaatggaaagatcagttggaaggtgtcaaactagcttatattggtgatggtaacaatgtatgtcattcattgcttttagccggcgctatggtcgggatagatatttgccttgcgatgccaaaagggtatgaggtcgacgaaacaattcttgcaaaggcagaaaatctggcgaagcaaagtggtggcaagattttcgttacagaagatccaaaacttgcagtgactgatgcggactttatttatacggatgtttggacaagtatggggcaagaagatgaaaatgcgaaacgtttggcggattttggcgaaaaatatcaagtaaatgcagaattagttagtggtgccaagcctgattaccacttcttacattgcttaccagcacatcgggaagaagaagtgacagctgaaatcattgatggcaatcactcggtcatttatcaacaagcgggaaatcggcttcatgcacaaaaagcattactagcagccatcttggaagcaaaataaaaaagtctggcgtaagtgccagacttttttattataagaaattacgtttcactttatcccagaaagaatttttaggcagtttgataatattgataaaacgatcgcctacttctaaattaacttcatgcacgtgttggatactaagtgcttcgctgtccattccaatcatcgggaattcgttatttccttcttcagacgcaatttcaatacgtagtttgcgttttggactaagaatgaacgaagaaccaagtgtgcggaatttgttattgttaatagaagccagttcacttacttgcatagatggaagaagtgggtccacgatagaaccgttcactgatttattataagcggtacttcctgttggtgtggaaataaccatgccatctccgcggaaagtttcgaagtgagaatcattaatataaagatccatcgtaagcgttctaataatagaagaacgaatgttaaattcatttaatacataaaaagctttggtgttattcactgttccatagatagttggataacgtcttactaaccaacgatcttcaatggctgccttgatgatttcatccaattgattaatatggaagtcacagtattgacctaattgctctgttagcgcaatccctgcatataaacaatcttgacggaagccagtttctcttacagatttaagaaaagcaccatcaccaccaatgctgataataacgtttgctttttgatagtcatccgttaattcatatccataatccgtcgtaattttcttcaattcttttgcttttgcatgtagttcttctgtttttcgataggaaaaataaaaaatagtttttgccatgttagttgtccctccagaatccaattttaatcaacaaacttattataacatgacttcagagcaatttctttcatcataagtaaaaaagtgaaatgggacacaatttaagagaaagattgtacaaaataaaagaggctggtattattacattatctaatcagaaaaaggggagaaataaatgaacgctaaaagatggattgcactagggattgtttttgcacttttgatagtcagtgcgttagcaaagtttacatcaagtcaaatcgcttcaaaggaagatagtagtccgacatttgtcgaaagcctattcgcagataccggcgaactaaccgaaacagtaattgaagaaggcgggaatgatacaattgctgtattatctgtagatggcactattcaagatacgggagattcaggttccttatttagtgaggctggctacaatcattctttttttatgcaacaattagaacaagtgagaaatgatgactatatccaaggcgtactgctgtatgttaattcaccaggtggcggtgtcatggaatccgcgcaaattcgtgataaaattttacaaattcaaaaagaacgcaatattccattctatgtttccatggggagtatggcagcatcaggtggatattatatttccgcgccagccgacaaaatttttgcaagtaaagaaacattgaccggctcgcttggcgtcattatgcaagggtatgactatagtgaactcatgaaaaaattaggtgtttcagataataccattaaaagtggcgaatataaagacattatgagcgggacaagaccaatgacggaagacgagaagaagattatgcagtcaatgattgatgattcttataatgagttcgttaaagtagttgcacagggccgtggaatgactgtagaacaagtgcgtaaaattgcagatggtcgcatatacgacggccgccaagcaaaagagaacggattgattgatgaatttggttatcaagaagatgccctagaagctttgaaaaaagaacaagggttagctgatgcgacagtcattcaatatgatacaccagaaaactttagctcgctattctctgtagctgcacaaaaaatctctggtcaaaatgcagatatttcccaactaatcaaattaactggcacacttaaagcgccaagaatgatgtatttatatggagaataatgtgagaggagaggcgcacatggctaatgaaaatgttacttttgaaagtaaacgccaagtctatcattatgaaccaccaattcagaaagaagaagccattcctaaacagtactttgctggcttttggatccggtttttagcttatttagtcgatttagttgtcatcgcagccttgaagggaatcattattaatccgattttccgcgtttctggaatggggatggatgacagtttcttcacattttattggggaatgacaacgattatctttttagcttactttattctgcttactaagtttttcggacaaacgcttggaaaaatgttatttggtcttcgcgtagtgaaacttgatggcgaaaaattaacttggttaaccgttttatttcgagaaggtgcgatgcgttttgtcttaaaaacaatttggccgttatatgtggtttgtgcctttacaccaaacaaacaaggcattgcggacttttttgaatccacatctgtcgtccacacgggctacttagaactagatgaaaaatgggtaaatggagcaaaaaaatagcttatagcaaacttcttctttaaaatggaatagaagcgtccattaaaggaggaagaaaaaatgactcaagtaacatttaaacataatccagttacactcgtaggtaccgaaagaaaagttggcgacaaagcgccgaacttcacagtggtgaatagagatttagaagaagtaacattgcacgattatgacgggaaagtgagacttatcagcgttgttccttccattgatacaagtgtttgttccacacaaacgcgtaaatttaatgaagaagcaagcaatttagataatacagttgtcttaactatctccgttgatttaccatttgctcaaaagaaatggtgtgccgcagaaggtttaccaaatgcgattacattatctgatcaccgcgatctttcttttggcgaagcatacggtgtagtcatgaaagaacttcgcttactagctcgttctgtttttgtggtaaatgcagcaggggaaatcgtctaca

SEQ ID NO: 3863 - DNA, 8145 bp, Listeria monocytogenes 4b
  misc_feature (1)..(end): n can be any nucleotide: a,g,c or t/u
gcatctatcattatgtttctcgttggcgtgcaagttatttggagttcaattgttcatattatcgaaaaagaatttgcaacaccctcgatgttaactgctgttgtcgcgcttttttctggtgtatttatgtatgctatttacttatataatcatcgacttgcgaaaaaacttgatagccaagctgtgcgagctgctgcatatgataatcgttccgacgcatttgttagtttaggtgcgtttatcgggattattggggctgttcttggtgttccttggcttgattccgtgacggcctttttggtcggtattttgattgtttatactgctatcaaaattttctatgatgctgcacataccttgacagatggtttcgatgtttctaagctcgaaactattcatgatttaattgcttctgtacctgatgtcaaaaaagtaattgatattaaagcgcgaatgaatggaaataagatttggatcgatgcaactatcgctgtggatcctgaactaaatgtagttaaaagtcatgcaatcaccgaaatcgttgaacaaaaaattcgtaacgaatacgaaggtgcgttcactttagttcatattgaaccattttttgaataatattcattgtcaataatcgtaaagtcaactataatttagattaaagtatcatttgctgggagggaatattcgatggggcagagaaactaattcacataaattatctaactagaatgaaaaataggcaacaacacattggaggagttctcttccaggacggtttttcttctatatagatagttttataataagcttatttatattaaactaggaggtgtttgccttagcagaaactatttctgtcaaggcgatttattgatattaaccattaaatttttaattatagctttacttattgctatatcagcatttttcgtggcaacagaatttgcgattgttaaaatgcgaccaagccgtttggaccaattaattgcggagaaagataaacgcgcagtcctcgctagacatatttacaatcatttgaacgcttacttatcagcctgccaactcgggataacgattagttcccttggacttggttggttgggggaatctacggtagaagcggcgttacatccgttatttagcttaatggaacttccgcaatcagctattacgattctatccttcacgattgcctttctatttatcacattcttgcacgtagttgttggggaacttgtaccgaaaacactggcgattgataaaacagaggcagttgcacttgcggtagctcgtccactgcatattttttataaagtgatgttcccgttcatttggattttaaatggttctgccgttttcatcgcacgtctttttggtttagagccagcttccgagcacgaaattgctcataccgaggatgaattaaaaataatcgtcggcgaaagttataagagtggtgaaatcaaccaatcagaattccgttatgtgaataagatttttgattttgatgaacgtatggcgaaagaagtcatgattccgcgaacagagattgttaccgttgatacgggctctactatcggggaattatccgacattatgcaaaatgaacgctatacgcgctatccggttattgatggcgataaagaccacgttatcggcgtacttaatttaaaagaaattttgtcagcatatgttgagcatggatctaatccaagttttagcattgatccttacgtaaaaccaattattcgtgtgattgaaacaattccgattaaagaattacttttccgtatgcagcgtgaacgttcccatatcgcgattttacttgacgaatatggtggtacttctggacttgttacggttgaagatattgtagaggaaatcgttggtgatatccgcgatgaatttgatgccgatgaaattccagaaattcgcaaaatcaaagacggtcactttattgtggatgcgaaacttcttattgatgaagtaaataatattttaggtactgaaattgaggaagaagaagtcgacacaattggcggctggttcttaacgcaaaattatgaagtagaagttggggacgaaattgattacgatggattcattttccgcgtaaaacaaggcgaacctcatcatattgaatatatcgaaatcatcaaaaaaacgaatgactaatcaaaaagtagctatccctctcgtaggatagctactttttttatatacgatgcgctaacataaattgcttgaacttctcagctgcgggcgttagcgtttggtttttcgcgactgcgagataaaagaatctctcccagtttgggcttctaattggtaagactttgacatccacataatttaaaatcggcatgttcggaactacagcaatcccaaagttttgcgcgaccattccggcaatgacttgatccacttcaatttcatatgcaatttgataatcggcaccaatttttctgaacaaatcatcgataattggacgcaaaccactttttttcgagaatgcgatatgcggataatctaccgtttcgattaaatcaatccagtctttctcagcaagaggatggcttttggggacgatgagcactaattcttgtttggcaattggcgtaaagtgaatatttctttcattttcaagtttagaacaaataccaatatcaaatttcttttcttttaggccttgaatgatatcaatcgaaacacctgtatggaaaataaaatcgatttgtttttctggttcggtttggagaaattcttgaacaagctttggtattagagacgtgccaagtgtttgcaagaatgccaagtcaatctgcccttccccattcgccgcttttttagtcgtcgcgacacccgcatcaatcatatctaaggactcttccacataatcaagaaatactttgccagctttacttaaccctatattccgcccttctttttcaaataaagggatacctaattcttgctctaaggaggaaattgcgtgacttaaactaggctgtgtaatcagcaatttttcagctgcttttgtgtaatgctccatgtgcgccagtgtgacgaagtatcgtaaatggtgtaaattcatgcttctctcctaactaaaaagttatctatgcaatttatctatcaattaatagaacaataccaatttgtttttatggaatagtcataatacaattagactgtagttacgccagtgaaataaactattccttaaaaaccaatatacggtagaataggttaactgtccagttccattttcaactattgaaggcgttatcacatcagaggtttttaattaagcggaattaatttttttactggtgtttgtgaaaatattatcaaagtttcttgtaatttttattatggagaggagataatttttatgacaaatgcaaatggcaacctaaaaaaatgccccatcacgattagctcttatacgcttggaacagaggtatcttttcctaaacgagtaaaagtcgctgcggaaaacggttttgacggaattggcttgcgtgcagaaaactatgtagatgcactagctgccggattaacggatgaagacatgttgcggattttagacgagcataacatgaaagtaacagaagtggagtacataactcagtggggaactgccgaagatcgtacagcagaacaacaaaagaaagagcaaacaactttccacatggcgcgattatttggcgtcaaacatattaattgtggtttgcttgaaaaaatccctgaggaacaaatcatcgtcgcgcttggtgaattatgtgaccgcgcagaagaattaattattggtttagaatttatgccatatagcggtgtagcagacttacaagcagcttggcgagtagcagaagcatgcggccgagataatgcgcaacttatttgtgacacgtggcactgggctagagcaaaccaaacagcagaatctatcaaaaacgttcccgctgatcggattgtttccatccaactatgcgatgtccacgaaacgccttacaaagaacttcgtgaggaatcacttcatgatcgtctagctcctggagaaggctacggagatacggtcggttttgcaaaaattttaaaagaacatggtgtaaatccacgtgtgatgggagtcgaagttatttcagactctatggtagcaactggtttagagtatgccgcccttaaagtatacaatgccacgaaaaaagtattagacgaagcatggccagaaatttctccacgctaaacacctactcgcttatgtgaaaataataacgtagtaggaagactccctgtgaaaggaatgtgttatttttgaaatttaattcgatgttttcacctattgatatcgggccgatgaaggtgcctaacagatttgtcgtatcgccaatgtgtaacaactatgcaaatacagatggaactttatcagatacttcccttgcttattacaaagaacgagcacttgggggttttgggtttattacttttgaagcaacggttgtagatgtacgcgcaaaaggtggcgcaaataaagcatgcctatatagtgatcatcaaattgctagttttaaacgagtgattgatgtatgtcacgatgctggagcaaaaatttctgttcagttacagcacgctggaccagaaggaaattccaaagtatctggttatcctttaagagcagcctcagcaatcgcctctgctgcagggcgtaatactccggaagccatttcgcgtgaagaactttatgagttgattgaactttacggagaagctgctttacgagcaaaaaaagcgggcgccgatgcggttgaagttcactgcgcacatggttatctagtaagtagtttcttatctgcacggacgaacaaacgtgtggacgagtttggtggctgttttgaaaaccgaatgcgattacctcggcttattattgaaagtattcgtaaacgtgtcggtcattccatcgcaattctttgccgaattaatagcacggatggtgtggaaggcggactaagtgttcaagatagcgcaacagttgcagcttatttagaagattgtggtttggatggtttgcatgtttctcgtagcgtccatattcgtgatgaatacatgtgggcgccaaccgtattgcatgcaggatttagctctgatcttgtaacacaaatcaaacgcgctgtttctattcctgtaattactgtgggtcgtttcacagagccgcattacgcggaattaatggttcgtgaaggccgcgctgacttggttgctttcgggcgtcagtctttagcagatccagaaacaccaaacaaagctgctgctggaaaactagacgaattacttccttgcatcgcttgtcttcaaggttgcgttgctaatatgtatgccggaaaacccattacttgtttagtaaatccgttacttggacgtgaatccgaagcttattcacctaaaactccaagtaaaaaagtagttgtcattggcggtggtgtcggtgggctttatgctggatggatggctggatcccgtggtcatgatgtgacagtttatgaagcatcagatatgattggcggtcaaatgcgcttagctgcctatcctcctggtaaaggcgacttaacaaacatggttcgaagttacatcaaaaagtgtgaacagttcgatgtcgaaattaaaacaaacacacctgtaacaccagaacttattcaagaagttgccccagatgccgtcattattgcaactggcgccactccacttgttttgccgataccaggtattgaggatgctggacttatccacgcagttgacttacttgatgggaaagagaaatgtggtcaaaaagtactcgtagttggcggaggtatggttggtagtgaaacagctgcatttttaggtgaagctggtcatgacgtcaccgttgtagaacttcgcgatgaagtcggagcagacgttatttctgaacatcgtaaattcctgatgcgtgatttcgatgaatataaaatcaaaagtgttacgaatgcaaaagtaacgagtttctttgaagacggggtaacctattccctagcggataacaaagaacaccgaatcgacggatttgactctgttgttctagcaatgggatcaagagcctataacccactggaagaagctataaaaaaaatggtacccgaaacctatgtcatcggtgatgctattcgtgcgcgccgggcattggatgcaacaaaagaagcactagacgctgtattacaattataatttatcattctactcgctgtaatgtgcagcgagtaggattcattcggaggaaaacaaaatggaaaatagaatttcaggaacgactaggcttcttggcttaattgggacacccgtagaccattcaaaatctccaatcatgtataattacagttttcaaaaagcggggttggattatgcttacctagcttttgacacacctattgaaaaagttgctgatactataaaagcaatcaagacatttaatctgcgtggcgcaaacgtgaccatgccttgtaaaagtgaagttttaaaacacatggatgacctttcccctgctgctcggatgattggcgctgttaacactatcgtaaatgaagacgggaagctaactgggcatataacagatggccttggttttattgcaaatttacgagatgctagtgtagatgtcaccggcaaaaaaatgactataattggtgctggtggtgcagctacagcaatccaagtccagtgtgcacttgatggggccaaggaaatcaccatttttaatattaaagacgctttttatgacaaagcaaaacaaactgctgcttccattaaacaagaagtgccaaattgcatcgtacatatttatgatttgaacgatacagaaaaactaaatgcggaaattgccactagcgatatccttgttaatgcgacactcgttggcatgcatccgaatgaacacgaaacacctattagcgatacatccgtttttagaaaagaacttatcgttgcagatattatttataaccctaaaaaaacgcaacttctactagatgctgaagctgctggttgtaagactgtaggcgggttaggaatgcttttgtggcaaggcgctgaagcatacaaattgtttactggtaaagatatgccagtttcagaagtaaagaatctatatttcaactaataaattcatcaggatttcgagaggagaaaaaaatgaacgcaaaaagattttatccaacagcaatagcactttattttacttattttattcacggtattggggtatccattcttggccaatacaaacaagatttcgccggagtatggggagcagataagctttctgatggcacatttgacgtaagcatggttatcgcagttatcgcagcacttggtttaggtcgcttgctgacattaccaatttctggacccttctcagataaatttgggcgtaaaccgtccgcattaatcggtgttgcgttatacgcagtttatttcatcgggcttgcttttgcaccgaatatgtatatcgcttacgctttcgcttttgtaggaggagcggcgaactcattcttagacacagacgtgacaccatcagttctggaaattttcacaaaaaatggcgccattgccaatatgtctactaaattctctatctgtatcggacaatttgcattacctttcccaatcggcatggatgcggcggcgaatatgtgattggggacactatggcgggttacaatgggcgcaatcccgattgatggctcagtgatgcggtgggtccggtggggtggggtgaacaatgatggcgggggcgaacaacgcggcgcgcaaaaaatgaaacgcaatgcccctggcgggggctgtcatgcggcgtcggggggacgcgccggtgcccgtgcgcagctctcgctcgacctgcccggggcaactcgccgaacgtcatcacggcctccgctccccccgcccctgaatcgcttccatcgccccccgctcacgacgacgcgccgtccggccgccgatacgctcccgcgcgtcattccctatagtcgcgcgcgccgcccaatcgccccgtccgtcccntcctctcccgccccccccccgccagcccgcgctctcatcgccgcccccctcggcgtggcgtaaaacgtccaacca

SEQ ID NO: 3864 - DNA, 5887 bp, Listeria monocytogenes 4b
  misc_feature (1)..(end): n can be any nucleotide: a,g,c or t/u
acatattaaaaatatccggttattctatggtagaaagcgctatcaacaaacgttttaatttggtaacgttaccaaaaatgaggtggaatagttggacatacaagaatctgtcatcggaattgatctaggtggcactaaaattttaattggcgaagtaacaaaagatggtgaggtgctaaattccaagagttacccaagtaatacggagaatcagaccaaagctaccgaaacattgttaaaggttttagatgattacacgcaaaatattggttttatagcaccaaaacaaacgggtattggtgtaggattagttggtcgtgtgaatcacaagtcaggtgtttggttagagattgaacctggaaaaagcaatccaaccccgctcgcagacattttagaagcaaaaacaggattacctgtaagtctgggcaatgatgttgtttgtgccacaatggccgaaaagcaatttggttggggacaagaaacaaacgattttatttatttaaatgttggtactggtcttgctgctgggtttgtggtggatggacgaatcatacaaggcgggcactttaacgcgggtgaaatcggtcatcatgtagtagatattcatagagaggcactcagaggctaccgtagacgcggctgtgggggccgacttcttccggtacttggcattaaagaagaagcactgagacgtttaaacagctagccgacatccatacttgctgaagccgaaacagaactaactggaaaaatggttcttcatgcagcggagcaaaaagatgagcttgcagaggaaattattgataatgcaacgtttcagctagctaatttgattatgaatttagtccgtacaaccgaccctgaatgcgtaattcttggcggaggcgtgacgcaaaatgagcattttttccaaaagatactaggtaatcttcaaagcaatacaattcgttttgttacaaaaggtgttgtccgctctaagcttgagaaggataaggttggcttaattggtgcagccgttattggaatgagactaggaaatgaaggaggaaaagaatgaagccaagtatgaaacgacaaattgcgcaaactggtattattcatcgaccactccctattgaaaccaagcatgcgttagaaactttagcgaaaaagaaacaagttttatcaagtaggactttatttagctctaaacaacatgtttctttagagtttgcacatcaaggagcaggagattttactatttctgaccaagatgaaatcaagctttcttcgcctgtggttatgccgcattggcccgctggtgctccggatgacggtgattatactaattttggtaacgttaccatatcggccccgattgaaaatgaggactggagcggctttaatcgtgtgcgaatccaagttttccctgattttcctggagtaacaaatccctatttaatgattagttttaaaaacgacgggagcgtgaaagtgcctgatatatatgggcgagaaggtgttcacggtgtgaatttaatcaaccatgaatggaatgatgtcatttttgaaattgaaggtttgccgcgtgaccgaatgaccgaaatgagttttagttattacttgaatggcccagagcgattgactgctggaacgatggaattattcattaatgaaattaaattagaacaaatcagtgagccggaaatctccaagggttggattccgcaagataatacgctagtttattcgcataacggttactctaagggcatgcccaaagtagcgttttgcgccaacaagtttgcagcgacttcctttacaattcacgacaaagaaacagacaaagttgtttttactggaaaaagttaccaaaacgcaacagaaactggcgatttcattattcttgatttttctgatttacaaactgtgggtgaatactatttaaaatttgcggatatgcaaacggaaatttttcaaattgggacttccgaagtgatctgggaatcttctatctggaaatcgcttaactttattttctgcgaacgatgcggttgcccggtttttgggaaacatacgacttgtcacgcagatattatcgctgaacacgatgggaaacagttgtcatttaatggtggatggcacgatgcgggcgatgtttcgcagcagctcattcaaacggcggaagtaacgatggctttatatgaaatggcttcgagtttacctgaaaaagaggaaatgttgcggatgcgccttttagaagaaggcgagtggggactagattttattttgaaaacgcgcttcggagacggttttagagcgactagcgcaggtatgacgagatggacggatgggcttgttggtgggatggatgatgcaattgcgcgcgttcataaccaagcttatgagaacttttattgtgctgggattgaagcgtatattggcagccaaattgcggataatgctactatgcagaatcatttgctgagaatcgcggaagaggatttactttttgcgataaaggaactggaaaaacacggaacgagccaaaagccgattttctgggagcatacgtatcaaacctcagaaagtctatattatgcgactgcttcttgggcagcttcgatggtttatcaactaacaaacaaagaaatatatgcagaaaaagcggccgaatggttatatttgatgctagaagcgcaagaaaaagctggaattagagacagcgaaactagcgaactttacaaaggatttttctaccgcgataaaacgcacaaggtcattcagcattttaatcatcaagcacgcgaacatctttatttactggcacttgaggcggcgcttgaaacgcaaccgagtaacgctgaaaaacaaacttggctacaagcggtcgaaatgtacggcgactatttgaaaaaagtaacacgtttcactaaaccatatccgcttattccagcaggactttataaaaaagatgagtatttagacgaagcaagtttccacttacaacatttactcatagatgaacgggcgatagaagaataccaattacaattcgagcaaggtatccaaataaacgacgagatagcgttgcgaaaattcccaatttggttctcgtttagaggaaataacgctattttactttcggcaggaaaagccgcatcgattgctggaaaaattttgaaagataagtcgcttttagatattgcggaaggtcagttacagtgggtaattggaatgaacccgtttggacaatcaatgatgcatggcgaaggttatcgctacgcacagcaatacagtgtactaaatggcgaaatcacaggagaaataccagtcggaatggaaacttttagaaatgaagatgaaccatactggccggagtttaataatgcaacttataaggaagtttgggtcggtaatgccggcaaatggatgtcaattgtagcagatttaaacaaaataacaggaaagtcataggaggacaaaaaaatgagttcagagagaagtttatctagccgatttattgaaggattatcaatttttgcccaaaaaatttcatcgcaaaagcatatcatggcaattcgtgatggctttgcagcgatgattccgattacgattattgccgcatttttcttgcttgtaaataacgtgttacttcaaccagaaaatggtctgcttaaattcattccaaatgtagaaaattatttgggtgtaggtattcaagtctataacgcgacactcggtattatggcgattttagcagcattcttaattggtaactttttagctaaatcatacggaatggaagggcgtacggaaggggttatcgctgtagctgcttatgttgttttaataccggcatcttcacatttaatgtcggttgacggtaaagcttttgaggctggcggcgttttaacccaagaaatgacaagttcgacaggaatgttccttgcaatcatcgctgctttagtcagtgttaccatgcttgcgaaattctcgaaaagtaaaaaattaaaaatctctatgcctgaaagtgttccaccggcaattgcaaaatcatttaacattttaattccatcattcttagttctaagtattttagcaattattgaagtgcttgtagttagttttgtatcaatgagtattccagaaattatcgtaaaagtactacaaattccattagttggcgggttccaaacgttaccaggtattctactttatgtatttttagcgggattcttatgggtctttggtattcacggcgcattcgtattaggcgcgatttctggaccagttcttttaacttctttacaacaaaatattgatgcagtgaatgcagggacagctttaccgaacatcgttacacaaccgtttttagatgcttttgtatacatgggtggcggcggaaccatcatctgtttagttatcgcgattttcattgcttctaaacgaccggatcaccgcatggtcacaaaattcggcttaattccgagtattttcaacgtcagcgaaccactaatgttcggactgccagttgtattcaacccgatttatggtattccattagttattgcacctctagcttcgactgcaatggcatacttcgcaacttcatggggctggattagccaaacttatattttgattccgtgggtgacgccaccagtgctttcgggttaccttgcgacaggcggagacattcgcgcgtccatccttcaaatcgcaattattatcgttggaacgctgatttacctaccatttgtactcgtagcaaaccgcgcgtatgttttagaacaaaaagctgctgggaaagtagaagcagaaacagtaacgaatggagaagtttaaaatgaaaccaacaatgatgacgtatattaatgaagaagaggaaatgtgtcgagtaattttagcagatttccaaacaaatgcagaaaaactagaatcactcgtaaaaaatggcgcaaaagaatggttaattttagcaactggatcaagcttaaatgcagctcaaagcgccaaatattacattgaaaatctagccgatgtccgcattacgattgaagaacccttcaaccatttatattatgaaaaattatcaagccatctagatttggttatcgggatttcgcaaagcggtcaaagcacgtcgaccatttctgcgctagaacgagtgaaaaaagaagcttccgttccagtagtcgctctaactagtgatgtaacgagtgaaattgctgaatttgcggatattacgcttgatatcggctccggaaaagaacgagttggctacgtaacaaaaggttttacagcaacagttctaacattaatgctgacaggacttcattttgcatacaaaacagtacaaattgatgaaactaggttcaacaatgaaatcagtgcgtttagccgagcaatcgatgcaatcccagcaacaattgccgaaacagaagcattttatgaaagatggcaagaggaattcgctactgcaccgaaattcacagcaattggatatggtcctactgttggaacatgcaaagaatttgaaacaaaattctcagaaactgtccgcgtgccatcacaaggtcttgatttagaagcgtttatgcatgggccgtatttagaagtaaatccacaacatagaatcttcttcttggagacggcgagtgcagttaccgagcgattagtattgttacgggattatgaatctaaatacaccccgtttacgtatacagttaaatttggtaaaggtgaagatgaccgaacgctagttataccaacagatttagatgaataccaagcgcctttcctaatgattcttcctttccaaattttagcgcatcatattgcggagttgaaaggcaataaattaacagaacgtatctacacagactatggcgtagcgatgaagagt

SEQ ID NO: 3865 - DNA, 8211 bp, Listeria monocytogenes 4b
  misc_feature (1)..(end): n can be any nucleotide: a,g,c or t/u
aatacccacctcttttatcacctatattgataacgtgtgctattactcaaacatttacaatgcctcaaatgaggaattcaacccctgtagagcggattgcgagatacagggcgccgctacctccccgtctagcacgacatatttgctaccaatacttaaatgccaaataaaaattatttagcgcaaactctgaaaagagctcaattactagtgtacctttttgcgtgtaaaaagtgctcgcgggaacacggaaatattttttaacggaagtaaacactcatgattgctgcgataatcgtaccaactacacaaatacctactaatgttaaagctatccatactatttttttattcatggctgctccccctcgttatcacttttcttttagtgattatatcatgaaatccaaaatttagctgttaatatcaaacttcttttgccaactatttaattggctgtagctcgacattaactgtgtgcttacttgtttaaaaatcagacgtaattccgcgtatttaaggacgttctcacttggatgatataccgctttaataggcagcgtatgttttagattcaaatctttcaaaattccgagtgagcgcataccaataattgctgctcctaaactcgagccttctatcgtatgcggaacacgtatctcacggttcaaaatatccgctagaagtctacaccaaccatcatgcgcagaaatcccacctgtgacgtaaataatgtcatctggagccgaaactgcctcataaacttctgcaagattgaaagcaacaccttccaaaatcgctcgaataaaatgggcttttgtatgattaatcgtcagcccaacaaaacctccgcgaatatcattagtccaaaatggtgcgcgctcacctagtaaatatggctggaataaaagacccgtagcccctggaggaacttcctccatttttgcaataaagcttgcgaagtctcgccccttaatttcctcttcagaaccaaattgttgcagaccccattcgactacttttccaccattgttcactgcgccacctgcgataaagtatccatcaccagctccataacaaaatgtccgaccacgagaatctatttggaattgattggtaagtttgcgaactgcaccacttgtgcctactgtaatcgtaacatcattttggccggtcgcttgaataccaatattagctagcgccccgtcactacctcctacaatgaatggtaaattttctgggattcccattaattcagcgtattcttttttcacaccagttaattgatatgtttctggtacaacttttggcaagagatcaggagtcaatttgacaatttccattgcttcaaattcccagtcgtgctccataatgttatatagtccagtccccgatgctaacgattcatccatcacccaaacaccaaataatcggtataaaatataggatttaatatcaacaaatttttctgtgcgtttaaataaagtaggcttttcctccttcaaccagcaaattttggcaaaggggctcatagggtgtatcggcgttcctgtggcctcatacagttggaataagtaattatccctttttactttttcaagcgtctcactgcttcgtccgtccgcccaagtgatacattcagtcaaaagctctccattacttccaaccataattaaactatgcatcgcagaactaaacgaaatccccgctaattcttctttattcacatttttcatcacagcttgaatagatgataaaactgcttcgaaaatttccgtggggctctcttccgctttcccagtttcatccgttattagttcataatgcgtcgcctgccggaaaatcacttctcctcgttgattaaaaagtactgcctttgtgcttgaagttccaatgtctacgcccattatgtatggtttactcgtcaaacaattcaccccgcgttttcgtttctttttattatacgtcaaatagaagaaaatttggggctaggctacttagcttttttgccaaacaaaaaagctagagaaattctctagcttaatttataccgtaaaaagtttttattcggctttcttcacctaacacaataagtgtatttttatccgcgaattttagcacttcttttgtattggcttcactttgagcgacgcaacctaatgtgtaattgtatttcggtgaatcaacatggtaaaacacagccgatcctttaccttttacacgtttagcgttgtatttcacttccattccgtatttgtactgcggaatcttcattttttcatctgcagaactagaggaattgcgttcttgccaagtgttataggatttgtcgttagagttagaaatccaataacttctattagtaatcgctctgaatgtcagcttcgtaccaggattacccttttgcccaaatgcaatgcctgtacgataaacgccaactggagttccagaacttttttcagagaactttggatcaaatccccatttgccaatatgactggtaaaatgacgaacttcataccaatttcctgcactatttttttggaaaaagtaggttgttgcggtagtattctttggttttgtggtgatgattgcctttttactgttccaaagagctggaacggtgtcagcaattgttggtttgccgacattcgtaaaggcacgcgagtcaatccatccgattgtagtatttcctagcttacaataataccatttagctcttgctgtttttccttcgcgcgtaataatcaacgtcttcttgtcgtatttcttagctgaaccgaggtacttaacactactactcgttttgtacatcttgctattaataccatcatttcgttttgactgatttactaccccttttagattaactgctttgtcataaatgattttttcgtaggatgctgcttcggcattaaaggagtgaccaagtaggctaaccattaaaacaataattaaaccgcttaataacttcttcattattcgctccttatttttgagttattccctatagcaattagtttattttttacgtttcctaagtaataacactgccacaagaataactataacacccgctaccacgaaaatccattctgtacctttgtcacctgtgcttggcaaatctgttttgtcatcttttgtaacttttgtaacatcagcaggttttgctgttgcgcttttgaccgcgttctttgtttcgattttcttcactttatctggagctgttacgactgcttcattttgttttttcgctgggacttgataggttacttcttcactataattacctgattcatcaaaagcatatgccgtaatttgttttggtgttgtcgcccattctgcataaaaataaccatctttatccgcagttgttgttccttctccaaagttttcatctgccggagaactcatatatacactagcgaatggttttgttttacctgtgaaaatttttgtttctaaatcaaaattcatatctgtaatagtcagttgggccgttttttctttgactaagtaattgagtttgactgctgttgttttgccgtcttcattatctccaaggagcgtgacttcttggatacctgtttgtgcagtacttagtttagaattggctgctaagcgataattggttagttttgtatcggtgtaatcagttaatgttgcggtgaaatctttgagatcaatcttactattttgttcatacgagtaaacttcttgagaatcggtaatatctatcgttgtttgaactttgcttttttgcgatgttgttacagtcgtgtcttttgtcggtactgctggttctggcttttcttcagtaattatgttttcagtagtatctgttgttttttcttctgtaggtgttgaattgttaccattttcatttgtttcagcgcttgctgccaatgagaatggaatgattagacaagttactaacgcagtaagcactagcccgtggaattttttcataataaattcccctttcattttgcttagtttaataataagcagaaatgtgatgaaagtcaattttaaattacaatattgttacaaatattaaaactgcgatacaaaaaaaccttgctaagattgtacttagcaaggcttaattttataattcaatcgggcgatctagttgataaagtcgtttatagcgtggttcttctgccattaattcagcatgaggtccttccattaacgtttttccctcttctaaaaacaagacgcggtccattttttcggcaccaactaaatgatgcgttacccatatgagtgacttatctgctaacgtttcaaagatagtcgctagtaaatcgcgttctgtaattgggtccagaccaactgttggttcgtctaaaataacgattggtgtgttttgtagtagaatccgagcgagagcgatacgaccacgctcaccacctgaaaaacgttcacccatttcactcatttgtgtatgatagccatctggcatgctcattataaaatcgtgcaactgaacttttttcgccgcttcgtatacttcttcgtccgatgcatcttgatttccaaggcggatgttgtttaagacggtcgtactgaaaaggtgcgctttctgatttaacattgatgtgatttcaggaatttgcggtcttaaattctccacttcaacgccgttcatagttacttttccagctgttggcagtaaagctccttgaactaatttaagaaaagttgatttccctgttccacttcgaccgataatcgccactttttcaccttgttgcaatgtgaagtcaaaaccatttaagatttctggtgacttttcatcgtacgcgaaagttagattttctgcttttaaaacaacattttctgtgttgattcgctctatttctttcgtttcttcttcaaaagttggtagcgtcggatcttctattttgtctaaacgagcaagcgagtcttggtataatgatttgtcactgatagcacttgaaactggtacaaacgcttctgctagcgccataattgccaaaacaaaagcggcaatcatcgttccagaaaaggctccatcacgtgattctgctgtactccaataaaccatcacgataaccataaagccaacaactaactgactaaagaaatcgcgccaattaacaaaatgaaactgtttattttctgttcgaagcatgtctgcctcgtctttttcgtagttagaaataaatgttttttcacgtccactgaatttccaatcactaataccaaacactgcatcggtaaatttttgatataaactattgcgcccttgttttagataagcattctttccacgagcatataaaagtgatacccatggaagaacgagcacaaggaggccaatcaagagtacaaagagcgcagcaaatggaatcgagaatgctccaagcgcgataacgacgcccgcgtaaagcacgaggctaacaattgccggtagcattgtagttaaatagaaattttgtaaatgctcaatgtcacctgcgaggaggcccagaatatcgccagttttataacgtgattttagtagtaacgcttgcggctcaagtaaacgatacaagcgaacacgcatcttttccagaattctaaggacaagcgaatggctcgaaaggcgttccacatagcgtgaaacggagcgcataataccaaatgcacgaacaccaactgtcgaaatataaaccgccatgatggattccggcatcaaggacgatttcgaaattaaatgtccagacgtaaacataagtgctccagcagaggcaaaagttagtgttccaaggaagatgacaagtaaaaacaagccgcggttttctttaatatatgggataatccagctacttttccgcatcatacttcctccaattgggctttgactaaattgtaatagaaacctttacgcgaaagtaattcttcgtgcgttccagtttcaacgacagccccgtgatctaaaacaataattcggtccatttcgagcatccagtgcaaacgatgcgtcgcgaaaaagacaagtcgattttcaaataagtctagcattggtttttttaactcatattccgtttcaatatctaagtgggctgttggctcatccattaacacaattggacgatccgttaagaatgcacgagccagtgcgacacgctgttcttgcccaccactcagcatccgcccagcttctccgacaagcgtttcataaccatcttctaatccagctacaagtttgtttaaacctgctgattctgccgcttttttcattttgtcttctgtagaattagggtggtaaaagcgaatatttccagcaattgtatcatggaaaaggtatggatgttgcggaatgtaagtgacttgggtttgccaatcagtcgaagcaagcgacgcaccacttttaccgttccaatgaaactctccagaagttggggtcaaaaagccactcaaaacatcaatcaaggtagatttcccagcacccgtcgcaccaataatcccaattttttcaaatccttttaccgtaaaactggctttatgaagcgaatcagcatcatctgcaccatgttttacggtaatattttcaaacgaaaactccgtattttcagcaaaagttgttaaaggtaatgcgtccatttctggcttttctgctttggcttggtcaataatcccttgaataactcgaccagcttcttgtccgtcaagtgtggcatggtaatccgagccaacctcacgaactggtaaaaagtattctggcgcaagaattaggacactaagcgcaattggcaaattcatgttaccgtcaatgagaccaagacctaggaacagcgcaacgagcgcaatcgataacatcgtaaagaaatctagcgcgaatgacgacataaatgccacacgcaacgttttcatcgtggctttacgataacgcgaactaaccgaagcaattttcccttcatggtcgtgactaagccccaaataccgcaacgtttccaaacccttcaacgaatctacaaagtggttagagagcacgcgatacgtttcaaattgggaatctgcttgttttttcgcggctaatcctagaataatcataaatacaattaaaatcggcaaagtaatcatcaaaataaaagcagaagtccagtcttgaaaagcaatatacacccaaatcatcgctggaataattgccatattcatcattttaggtaaaaacagttccaagtaatttcggaaatccgccacaccttccataaccatcgtgaccactttcccagttccttccgctcgagcaaaacgcggtccaagtgcgaacaaactatcaagcaactcttcccgcatcgttttcgctagtttcgcagcataacggtaaacgatttgttttttccatacattcaaaaagtgacgcaagaaataggcccccgcgaagagacctatttgtattgtgactgattgaaacgcgtgctcgtgaaataagtcagtaatcgcacgagctaaagttatcgccatcacgataatcgcagcaccttgaactagcgtgaaaactgcgagaatcgccattatttttttaattcctttgtagttccttaaatcttttcccattaatacgtcattttctccttactagaaacgcgcttacggaaaacatagtagctccaaatttggtaaccaagaacaaacggcagtagcgtaacggcaactatcgtcatcacactaagcgaatattgtccggaagctgcattttctatagttaaatcaaacgcactgttgatagaactgatcattacacgtgggaatagtgacacgaaaatcgtcgcaatcgtgaagacaattccaagtccgccgaatgtaaatgccaaaatatcacgatctttccaaataaacagggcagatagcacgtacataacgactacaattccaatcatcagtggtacaagtacaggtctaacttggaacatgtcagtattgaagtaagcaagtacaacgaaaattactagagctggtacagtaataaaccaaacacgtttcgccatacgacgagcacggtcttgaatatcctcttctgtacgtaaagtaataaatagtaatccgtgaagtaggcacatgagcgtaatcgtcacgccaccccatacggagaatacggtaatgtaatcaaagaacccagcgtacatatccatatcactattaatcggcataccttgaatcaagctagcaaataatacaccaaataggaatggc

SEQ ID NO: 3866 - DNA, 7868 bp, Listeria monocytogenes 4b
  misc_feature (1)..(end): n can be any nucleotide: a,g,c or t/u
gaaaagaaatggagcgcgatttagaaggtacgctccggaaaatgcatgaaatcggctttcgatatgtgcaacttgatggtatgcgtggcaatgatccaagcgaggtacgtcgtttactgcaaaaatatgagttaaaagtgatcggcatgcacatcaagcatgatcgttttatgaatgatttggatggcatcattgaagaagcttatttctttgattgtaaaactgtttttgacaaatatattgaagaagaggaccaaacgacagcgggctacacggcaacaaaagcggcgttaattaatgcggcggaaaaactacatccactaggttttcgcattggtcttcataatccggaatacgatttcaatgaatgcattcatggtcgcagagtgatggattatattaccgacccagttgacggtatttgtatttatgctgaacctgatacttactggattcgcgcagctggacatgatgaaacagaatttattaaacgctacagcggccgcgcgccgattgtgcatatgaaagattttgtgagcggttttgaactagaagatatggataataatttagtcgaaatagggcaaggtgaagtggattttcgcgctattattgaatggggcgaagcaaacggagtcgagtactattgcattgagcaagatagatccaaacgagctatgttcgaaacactagaagccagttaccaatatttattgcagctataaaaagaaaaacgtcagacttgttctggcgtttttttgtgcgcaaaatcattgtacggtttttaacaagcaagttgtgggaactataaagatagatgttttaagggggaatgaaacaaaatgaaaaaaagatggttagtatttgcaattatatgtttaattatcactggatttttaagcccaaaagcagaagctgcaacagattacggcagcagtttttttactaatgtatcattacaaaatcaaaacggggagcaaacaacgaattttaaggaaaatagtaaagtgcgagtggcgtatgattttgtcattacacagccagttgcaagcggagaaacaatgacgcttactattcctaatcaactaaaattaattaattatggcggattccctcttatggattcgcaaggaaacactattgcaaatgcaaccattgatcaagcaacgggaaccattacattaacttttaccgactatgtaaatacacatacagatttaagtggccgcctcttttataacgcaacttttaacagcaaaaatattcaaacagatcaagtaaatccaatcgcatttccggtgaaaaattcgacccaaacgataaacgcctttattagcaaagttaatactggtggcggtacgggctcaccaacaatcgtttttaaacaagggcgaatggatgataaagacttgagtattttacattggactgttactttaaataatgcgctgacacctattgataatgccgtttacacggatacgcttggctcagggcaaaatctgcttggaagtgcaacaatcaaataccgcgatgccaacaaaaaagtgataactaccaatatccagccaattacgctggatgcagatcgcaattttgaattatctattggcacgttaaataatcaatctgttgtcattacttatgatacgaaaattacgacgaaacaaaaaagctatacgaataaagcaacactatccggtgataacctagatgctgtttcgagaaatgcgacagtgaatgattacggtagcggtggacaaggaacaggaaccccgccagccccaccggttaaagaagaaccaccatttattccggctgaaaagcaaccgattgaaaaaacagtcgaaacagattttggtccacttgaaatcgttaaagattccgaacaaaatggtaaaattaaagtcatctataaagtgaaagatggcgatacattacctggagtagctaataagtttgatgtctctgttgcagaaattaaagactggaacaatctcacatcggatactttacaagccggtcaaaaattacaactaacgattgaaaaaacactcttatccaaaatcaccattccacctgtgcaaaaagtgactagcacaacaagcgtagacggtgtcgtaaaagcaacaggggttttacctcatactggggattcgaacccgtttatcccatttgtaacaggggtaagtttagtagcacttggttttacatttggacgtagaaattaacgaaaaaggaagcactcttcttatgaatgagtgcttccttttttattataataagtgccctttttttcgatgcgtcacttgttggtttttagaatgatcatgaaacgatttagagtttttctttggtttctctggaaggtttatggtgattgttttgctctcactagtcccatctgtcattgtcgctgtgattgtcactaaattatttccaggttgcaaattagctaatgcaaattgatggttttcggtgctaccagcaattgattgcgtttgattatttgtttcggtggtaatcgtggcggcttcctctgttacaaacattaattccgcgctattttttgtcgtttcaatataaggattttggatggagtaaggtagaaacatatccattaattcgtttgtggttgcagttgtataagtagttcctgttgcttctttttgcgcgtgggcaatctccggaagccagtttaacgttagtgataaaagcgctattattaatagaatataaccttttttcttcatccttctcacctcttcttgttatattataaaaaagaaatatgaacaaactatgaataaaacatgatagatttaaaaaatcgctaccaatttagctgtttttaacgtaagataaaagaaaaaaggagtagagcaatggaacttgataatttagaaaagaaattaccggagaaaattaaaacagtttggcggcaaacggagggaattgctgttcttacttttctactttgttcggttgcagcggcaatcattttgtattatgcaggagcttcggtgtggtggagtgcgatcggttttggattaacggtactttatgctgcctttatttacttattcattattccgtttcgttttgcacgttggagctaccagattaaaccagacgaaatggaaattcagcacggcattatttttagaagtcgtgtcttaattccgatgattcgcattcaacacgtggaaacggagcaaggtccgctacttagaagacaaaaactcgtttctttatcgattacaactgctgcaaaaacacataagattgaagcggtaaacgagtctgaatcagatgaacttagacatcatattcttgaacttgtgaaggtggcgaaagaagatgtttgaagaaagacgcctccatccgattgccctcattaaagaaattattacgaacgtaagacgcaatattgttcctatcgtcgtcggtttattttccgttttccgcgccattaatagtaacggttatttgccggactgggctgtatatttaattattgtcatcgttatattactcattttaacccccgcagtcttaaaatacataacctacaaatacaccctcgaagaccaagggattcgcatcaaatacggtttgatttttcgaaaaaatacatacataccttacgagcgcatccaaaccgtccaaaagaaacaatggtttttctttatcccatttaatgtctgccaaattttaatcgaaacagctggcggtaacgggaaagcagaagccgatttagtcgctgtcccagttggcgtagtagacgaattaaatgatttacgcgacggtaaaaagagagacatccaagaagccgtgccagaaaccgaggaaaccacagtagaagtggcagaagcaccagaaaaaacggtcatgctacaaacaaaacagcttattttaatggcagtaacatccggcggcgttttcgggacgctccttatcgttctagcattcatgcaacaattccgagaagtcatcccgacagactggatggaagctcaagcagaagagttatggaaaatgggcattatcgtactaattgtattaattgtcttgattcttttggtattatggggaatatcgattgtgacgacattgttcaagtatttccagttcaaattgatgaaatatcccaattcacttgttgtagaaaaaggactattagaacgaaaccatacaaccatttcactttcgcgtattcaaggaatcaccattattgaatcaccactacgacaaatgctcggcttagtagcggtcaaagttactactgcagggaactcaggtgatgaaaaactatccggcgacattttacttttgcctattatgaaaaaagcgttggctttaaaaacattaaaagaaatgctaccagattatttatttgaaatagaaaaaatggaacgtgctccaaaagccagtttgcgcagatttttgcagatttacttgatctggacaattatcccagccgcagtagcaagtattttatttttcccactcggcttaattagtattattttgccagttttagcagggataaaaggggtagccagctaccgcgcgactggagttttcacagataagcacacactccttgtccagtcacgcccaattttctccaagttaacgcacattatccgcaaagagcgaattcaaggtttaagcttaagacaaagcatttggatggaaaaaggccgatcaaggcacttaaatgtttggcttaaatcaggaagtacaagcgctgaagcttatgttcgctatatcaatcaagacttagctatcaaggtatacaattggtacagcccgtccaaaacaataaattaaaaaagaacacgtcatttcctaaaaatcgctgatcaatagcgactgtaattttggaaatggctgttcttttattttttgttcaattaccctgaaatctggtaaaatagatagaataaacgaaagagtagatagagaggattggttaagtagtgaaacatatagtcattatcggaggcggcttatcagggcttgcagcagcgtatgaactacaaaaaacacatccgaattatacgtgggaattagtagaaaaagacaaaaaactaggcgggaaatttgaaacggttaaacgggacggatttttaattgaaaaaggaccagactcctttttagcaagaaaaccagctggtgtaggcttagtgaaggatttaggactcgaagataaactgattgcgaacgcgacaggaagatcctacatttaccaccaaaaagcacttcatccgattccagaaggctcagtgatgggaattccaacagataaagaagcattgctagctagtacactcgtatccgaaattgggaaagctcgcgcacttcaagaaccaacaatggaacgaaataatcaagaacaagatcaagcacttggcgaattctttgaagcgcgattcggtaaagaattagtcaaaacaattatcgaaccacttttatcaggaatttatgccggagatatatacaaaatgagtttacgcgccacttttccacaattcgaacaagcagttaaaaaatatgggaatttgatggatggcttaaaagaaagtagcatgcaaacgacagggacaaaagctactattggtgcttttcgaacattagaaggcgggctagatgcgttaccaaaagccattgccgccgcacttccaaaagaaaatttgcatacagcaaaacaagcaacgaacattacgaaaaagaatagctcttacgaaatttcttttgtagatggcgataaaatggaggcagatggcgtcattatcgctgccacacatgatgcgctaattcatttattagcagaaaaaacgacagaaccattcgcgggacaaccgcttacgactctcgcaactgtctcattagcatacaatgaacaagatgtaccgattttaccagatggaacaggctatctagttgccagaaccgctccatataaaaccactgcttgtacatgggtgcagaaaaaatggccgcatatggtaccagaaaataaaatgttactacgaggctttgttgggaaagcgggagaaacttggttagagcaagcaagtgatgaagcaatcgtttcagctgttttgagagattatgcggaaatgatggaccttcacgccgcgccacttttttatgaagtaagccgaatgaaatccgcaatgcctcaatacttagttaatcaccaggaccgactaaaacaattgaaaaagaacatcaaagcagattacccaggggtttattttgcaggaatgagctacgaaggtgtgggtattcctgattgcatcgcaggagctcaaacagccgctaaggaattagtagattacttggaagaggtgtaacatgattaaaggaatcggactagatatgattgatttagaacgtgtaaaacaagtcgtggaaaagaatccacgctttatcgaacgtgttttaacagaaaaagaaattaagcaatttgaaaaatacgaaggtaatcgcaaaatcgaatttttagctgggcgttttgcagcaaaagaagcatatgctaaggcgaatggaactggttttggcaaacatttaagttttacggatgtagaaattttgcaagtagaagatgggcgaccccatgttactttaccagtcaaatcaggtgaaaacgtttttgtgagcattacccacacagctagatcagccgcagctcaagtgataattgaaatttagaaaggaaagtgaacaatcatggtgacaggctggcatcgtcctacatggattgagatagaccgcgcagcaattcgcgaaaatataaaaaatgaacaaaataaacttccagaaaatgtggatttatgggcagtagtcaaagctaatgcatatggtcacggaattatcgaagttgctagaacagcgaaagaagctggagcaaaaggtttctgtgttgccattttagatgaggcgttggctcttagagaagctgggtttcaagatgactttattcttgtacttggcgcaactagaaaagaagatgcaaatttagcggccaaaaaccacatttccctcactgtttttagagaggactggctagaggacctaaccttagaagcgccacttcgcattcatttaaaagtagatagcggtatggggcgtcttgggattcgtacaaccgacgaagcaaggcgaatcgaaacgacaattgctaaagacaatcaactacaactagaaggtatctacacgcattttgcgacagccgaccaacttgaaactagttatttcgaacaacaattagctaagttccaaaccattttaacgagtttaaaaaatcgcccaacgtatgttcatacagccaattcagctgcttcattattacagccacaaatcgggtttgatgcgattcgctttggtatatcgatgtacgggttaaccccttccaccgaaatcaaaactagcttaccatttgagcttaaaccagcccttgcactctataccgaaatggttcatgtgaaagaactcgcaccaggtgatagtgttagctacggagcaacctacactgcaacagaacgagaatgggttgcaacgttaccgattggctatgcagatgggttgattcgtcattacagcggatttcatgttttagtagacggggaactagccccaattataggacgcgtttgtatggatcaaaccatcataaaactaccgcgcgaatttcaaactggttcaaaagtaacgataattggcacggaccatggaaacacgataacagcagatgatgccgctcactatttagatacaataaattatgaggttacttgtctgttaaatgagcgtatacctagaaaatacatccattagaaggtaatattcgtgctttt

SEQ ID NO: 3867 - DNA, 6066 bp, Listeria monocytogenes 4b
  misc_feature (1)..(end): n can be any nucleotide: a,g,c or t/u
gttagttgtgtggcaatctattatgcgcagcagacaaatcagtacaatacgaattttttaggaatgcaattggtgtttttagcaattgggacgcttacgtgttttggtgtttctaggcttccggtggagtttttgcgacatcatgcgatttggttgtatgtgattatggtcattacgctcctaggtatactcattcctaatcctttagtacaaaatataaatggagcgacacgttggtatcgttttgcagggctatcttttcaaccttctgaagtagtaaaatccatatttatctttgtgttggcgcattttgcagtgaaatatcaagcacaaaaatggaaacaattagggattctgacggtgcttacggggatagtattactattaattatgaaacaaccagaccttggtacgacgattgtttacggggttacggcgctagcgattattttactggcaattaaatcaaccaaactgatggtcggaattattacgttaatcttaacagctgcaacagttggtatgtatgttgtcgtgtatcacattagcttattagagaaaattgggtttcacgcgtaccagttttcacggattcagacgtggcttgatccaacaactgacccagacgccgtgtaccaacttaacttgtcgataaaggcggttggttcggggatgatgactggtagttcggggacaaatgcgtatatccctgaaagccatactgatatgatttttagtacgattggtcatcagtttgggtttgttggtgtaagtttgttgttaattttatttatgctacttatccatcaattaattatggcagcgctattgatgaagaataccttttcttcgcttgttttagcgggctttgcagtgagttttgcctttaatatttttgaaaatattggcatgactgttgggcttatgccgctgacagggattccgcttcctttcattagttatggtgggagtgctgtgctaggtaattttattgcagtgggtgtagtgctagcgattatccggtcagatgccgatttaatagaagaaaaaaaccagctgtcatgacgacaactggtttttttagtgttatttattcttataaaggtctacaatttctttcgctaaatctttgaaagtgattgcattcattaagtggtcttgtgcgtgaacgagtagaagggaaacttctgttttttcgccacgtgcttcaccttgtataagttttgtttgagaatgatgcgcttcaagtagtgcttgttctgcttgggcgatttgttcgtctgcttgagcgaaatccccttttttagcggaatcaatggctaacatagcatcgcttttagcgttaccaccgaacacgatcaagctcataatagtttgctctaaatccatctgtaaacacgtccttaaagttttggtttttaaaaattattcagcagtaacgccttcagcagcaagtgcttctttttcacgacgtagctcttgaatttgagcaattttcgcgaatggaaggaagattaggatagatagacctaagtttacagctgcaagtacgccacctgcgatactttgtgttgcaagtgctccaccgataattggtggtgtagtccaaggagttacgatagtacaagctggtacccaaccaatagctgttgcaaagtaagctacagttacaagtacaagtggtgccaagatgtacggaatgaacataattggattcaagacgattggaagaccaaacatcattggttcgttaatgttgaaaatacctggcgctgcagacaatttagaaactgtcatgtacgctttatgtttacgagctacgataaagatagcaatgattaaaccgatagttgccccagttccgcctaagttaacgaaagagtcaaagaaaggtttgttaacgatgtaaggaagttctttaccagcttctagtgcttttacgttagcttcgatagctgggatgttgattgtttgcatgaacgggtcgataatgttcgcaccgtgtaaaccaaagaaccaaaggaaagcagaaacaaatgccaataataaagctgctggcaaggagtttgcaagacccatgaacggttcttgtactaattcgtagaaagaaattactaagttagtcacaccagctgcttggaagaacgcagtgataagaccaaagatagaaacagtgatcattgcagggaataaagctgcgaatgaacgagaaactgccggtggaacaccatcaggcatgttgataattaatttcgggctaccacttaaacgagtgaagatttcagtggaaagaattgcaataattaatgctaagaaaagaccagttgatccaagaccaccagtgtttgcaacgccgtctgcacctggagcaattgcgccaattgtgaagaaagttgctacagaaactactgcggaagaaagtggatctttgtcataagatttagctaagttgtaagctacagtgaaagcgataagtagtgctaagatagcaaaagtaccgttccaaacgtttccgccgaatgcttgccaagttccttcaccaaataagttattcatgaacttttggtaagctggaattgggaagttgttaattaaaacggcgaaagaccctagaatcataagtggcatagttgtaatgaaaccatcacgaattgctactaaatgacgttgtccaccaattttggcagcgtagggaatgaaatatttctccataaatgcgataaaaccattcattttttattctcctttttgagggataaagtaacagccgggttaagacgaatacataatttctaaaacatggcgttattactatacctctttagttttttataattttcagctagctagctgtaattaccctctttttacttcattaactctaatgcttgttctaaaactttgtcgcctttcatcattccgtaatcaacactgttaataacagctaatggaataccttttggctctaattttttcttcatgtttccttctaagaaacgtacttgtggtccaagtaataaaacatcgatttcgtctaaatggttagctgcttctgcttctgcaacggcgaagatttttgcttcaaggcctttttctgcagctgctttttccatttttgtaactagtaagctggtagacatacctgctgaacatactaacatgattgttttcatgattatttcctcctctagataattctcttaacacttattatatatgcaagtaccgtgccaactttaaatgtggctataaaagggttttcattttgttttttgcttacacattggctttttttgtgtgtaaattttacacacatagagatattaacggaatctttatgcggagctttagaatcttaacactgtctttatgcgtttgttggtaggattagtggtggaaagagtacggtgaaggggtgaacggaaaatgggtgttgttctagtaattgctggaataatcggtttaggtttgttggtatatttattttatgtgttatttagaggtgaggacttatgaagtatatcgtgatgcaagatgcgttttttgttgtattgttattagttttggcggtgcctcttggaatttatatgtataaggtgatgattggggaaaaggtatttttgtcacgagtgcttgagccggttgagcggtttggttatcgattgatgggtgtgagtgaggttggcatgtcggcgaagcgttatgcagtatccgtacttgcttttagtgcagttggctttgtatttgtaatggcggtgttgatgctacaaggctttttaccgctcaacccggaaggtatgaaaggacttagttttagtcttgcatttaatacggcggcgagttttgtgtcgaatacgaactggcaagcttattctggtgaggcggcgttatcttatttttcgcagtcgattggtttaacggtgcagaactttgtttcggcagcgacagggattgcagtattatttgcggtaattcgtggctttatatggaagaaacagaaaacgataggaaatttttggcaagatttatttcgagtgacgctatatattctattaccactttcgcttattttggcgcttcttttagtatcgcaaggagtggtgcagtcatttgctgattattcggttgtggagacgcttgaaaatggagcaaaacaattgattccgcttggtccagctgcaagtcaaattgcgattaaacaactgggaacgaatggtggaggctttttcggggcaaattcggcgtttccgtttgaaaacccatctagttttactaatttaatagaaatgttggcgattttacttattccagtggcgcttgttgtgatgtttgggcgtgcggtgaaggatagtaagcaaggacgcgcgattatgacagcgatgatgattgtttttgttattggtgttgttgcgataactatctccgaacaatttgcaggtccacattatcaaggtgttgcgacttctggcagtatggaaggaaaagaggttcgttttggtgttggcggttcgtcgctttttgcagcttccacgacggcagcctcgaatggagcggtgaacgcaatgcacgacagtttgactccgcttgggggactggtgccgatgttctttatgcaactcggtgaggttgtttttggcggtgttggtagcgggctttatggcatgattggttttattattttgacggtgtttattgcggggcttttggttgggcggacgccggaatatttagggaagaaaattgaaccttatgatatgaaaatggtttgtttgcttattttggttccgccgctgttgactttgtttggaactgcggttgcggtgatgatgccaagtgtgcaagcttctgtttcggcgagtggggcgcacggtttttccgaggtcctctatgcatttacttcgatgggaaataataatggtagtgcttttgctggatttgcggcggacacgacgtttacaaatatggttggcgcagtaatgatgttacttgctcgttttattccacttgttgcggcgctttatttagcgcaaaatatggctggaaagagttcggttgcagcgagcagcgggacgttatcgacgaaaaatggcatgtttattggtcttttaattggtgttgtggtacttgttggcgcacttagtttcttgccagcacttgcgcttggaccgattgcggacttctttacaactttcaaatgaggtgaatggaaatgatggaaaaaggtatttggaaagatgcgctgattcagtcgacgaaaaaactgtctccaaaactgcaagtgaaaaatccggtgatgttgcttgtttatgttggtgcgattttggcaacgagcctttattttctcggtttcttcgggatttcggatgagaagtctggttatacgctagcaattgcgctgattttatggtttacagtgttatttgcgaattttgcagaggcgattgcggaaggtcgcggtcgagcacaggcggatagtttgaaaatggctcgaaaagacgttttagctcgaaaattgaagaatattgatgataaaactgatgtgatcgaaattgcttcgaatgacttgaaaaaaggcgacattgtgtatgtccttgcaaatgaacaaatcccgatggatggcgaggttattgaaggtgcggcttcagttgatgaaagtgcaataactggggagtctgcccccgtaattcgagagtctggcggggatagaagtgccgtgacgggtggaactacgcttgtttctgactggcttgttgttcgtgtgacggcggtctctggagaaagtttcttagataaaatgattgcaatggtggaaggagcttcacggaaaaagacgccgaatgagattgcgctacaaattttgcttgtaacgctttcgattatttttttggcagtttcagcgacgcttttaccatttactgaatttgcgagtaagcaggcgggtgctggatcggcaatttcgattacgaatgtgattgctttgcttgtttgtttggcgccaactacgattggtgcactactttcgtcgattggaattgcagggatgagtcggttaaatcaagcgaatgt

SEQ ID NO: 3868 - DNA, 6212 bp, Listeria monocytogenes 4b
  misc_feature (1)..(end): n can be any nucleotide: a,g,c or t/u
gtaactctcgacaaatatacaactgaatttccagaactagaaacagagaccggcaaaataatcccactaaaatggcaaaaaacggcaactgaatggaagggaagtctaactttaccgagcgaattatccggtgaaatcattcatattcaaggaatggatcaacacctgctcgttcgcgccactagtgaaccttttggcgaggttcagttagtcaacaatgccattttaacaggaaccattctttcggatttcacacttatttcaaatctttatattgaagtaaacggtcaaaaattttccgtcgaacgagcgggcaaccgtttcacaagtgcagaaataaccaccacaggcaaaatagtgctccactggacagactgggacggccaaatttattccaagcaaatgaatcaagaaatcaagcctgtaatcgcaatgccaggtaaagaaataatcgcaccaccaccagtaataccgaacgaaaaaacgcagatactaacatcaccagctcctaagccatctgttgaggcacatgaaaatacccccaaaaagcaggtgaaaaaggaaacctcaactaaagacaactcaagcagtatcccgttttggattccggcgctcatgattattggcgttattattttttcgggtaatagagcaatgaaataaaagcagaagtgaggtggacggaatgaaaatagatggcattcaagaatctgcagaaaatcgtaatcaactagaacgggaactcattaaacaaaatccagttgtaaaagaaggtacgataaaagcacaaatgaatacagaagtagccgtaccgaaaacaccgccagtatcattctcttttaaagaattaagcagcttacaactaaacggaacaagcgcagcaagtttagaattatatatgaaattaatgatgaacaatgctaaaaaagcgaatgatttaatcttttacgtgatgcgggcgggaatcaaaaatccaactgattctactaaatggcaaacagtcagaagcgagattagtagccaattaagtacaattctaatgaaacaacataattttgaagcgtacttttctgaaaatcccgcgaatcaaaaattatttttagccaatcaaaaaattatgaacgaaatatcctttttgctaaaaatgttgccaaccttaacttttgaaacaacaggaaaatacgacttcttgcgcatgatgcaaatagcttctggcaatatggagactggaatccaaatgatgcgcgaattccaggggcatatcgaacatgcgacaagactagacccgattgttgacgccagacaagaaacgaactggatgattaaagtgttacgcgaatttggcaatatgttccaatcgcgccacttattaccatatgaattacaggcagaaaacatcaatatttggaagttgagtagcgaatacttaaaactaatgaaccaacttttaccgcaaattggcgcatttccaaatgggaatatcaaaatttttcaccaacaagcgaccaagccattaacggaacttttccaagaactgcaacgcttggcagacggacaaatgacgcaaggtgggatcgccgttattttagaccggatgcaaggccaacttacacgacttgcacaactgtttcaaaaaatggaaatcgaagcaggtttcaccgatacagaacgaattttaggtagtgtggacgccgaattcgctagtgatatgacaaaaatgatgctactcgcacaacaagaaatgtcattttttgatttattagtaaaagatttccgaagtgtttctaaacaaccaatatttttcatgatagttgctatatttattattttattattaattattttattttaaaaaagatattttttgaaaaaatatatactttttcaggttgtttcagtataattaaatagaaaaataaggtttagaaagcgaaaatgagtttttcgggggaaaaaggatgaataatgtttcaattggccaaatttcgcagtccaaacagacgaatgtagttaggggaatgcaagaattaaatcaaacacaacagctttattttgaacaaatgaaggcaaatggcaagaaacaaactccttccctgactgaaattaacgaactaatcacgaatgtcacagataaaaagtcactcgttgaaatggatatgacggtagataatgttttgagctataaaaaagcagtccaaacatttttgaatttttatgtgaataatgtgatggattacgacaatatcgaaagccgtcatccaaaatacgggttttcgcaaaaaatgacgattttaaagcaagtagaaaaacaaaccaatgaactcgatgatgtaatgaatttaattgatacaaaaactggacatttagacatgctaaaccgtattggtgagattactggcatgattctcgatgtcgtattgtaggtgatgggaatgcaaaacgaattaatcaatcaattagaaattttaatcgaaaaaaatgtcaaagcgaccgatgcagcaattttactcggaaaattagtgcaagaagagaactggaaagaagcagaagaatgccaactaggactacagcgcgaacttgccgctttgcaaaacgaatatcaagctttaaaaacaatcattggcgaagataatacgcttagaacgctccaaaatacttggacacctgcggaaaatgccattatagatgaacggaaaaaaatgctacttgaaaaagaaaaccttttacgagtaagtgttacggaaaaccaaattagaacagaaatgcaattggctttttcggaacatatggtggatgttattacgggacatcacgcggaaacacaagcagaaaataatatgatgataaacgagactttttaagtaaacggagggattttttgtgcgtttaagtgattttaatacgtcattatcgggcatgtcagcggcgcaaatcgctaatatggtcgctcagcaaaatattagtaatatgaatacgccaggatacataagacaagccgtggatcagacggcagtatacggtgacggtggtctgcttggtgggaaacaaacaggctacggagtcaaagtgacagacattaaacgtctaacaaatacagcacttacgacacaatacaataatcaaatcgccaaacaatccgcttcgttatatcaaagtggggcgctcggtcaggcacttaatttatttggtactccagggaaaaatacgccaagtgataatttagataatttcttcaccgcttgggcagcattagcgaaaaatcctgaccaagcaacgaatacaacggcacttttatccagtatgtcgatttttacggatcaattaaaccaacttcattcgggcttaaaagaattagaaacaaccattgcagcagatacagatgccgcgattcaagacttaaattcattaattaaaaaattaggcagtatcaataaagcaatcggaaatgcaggctccaacccaccgaacgatttgctgaaccaacgcgatcaactacttagtacgatggctggctatgctgggatttccgtgagcgcccatccgaataatccagatgtgtacgatgtgacaattggcggacgtcttgttgtccaaggtgatgaaacgaccgaaatcacatcaacgcgaaccgcgactggctttgaattttccgtagacggtcaaaaactcaacatgccagaaggttccatcatcgcttccgttcgtgttaaccaaaatgaaattaaatcgtaccaagaaaaaatcgaaactttttcgaacagcctagcaaaagcattagatgatattcaagtcaaaaacgtcaataaaacaatggacgatttgcaaaaaatcaatgatgcgctcaaagcgaatccgaacgacgaaaaactactgagcaatcgcgatgaacttttgcgtcaattagaaaaattccctggtgtgactcgttctggtgatacgctgacgattggcggagttgaccacgcgattgacacgcttggcacgagtacatatgtaaccgatgtgaatgatttttccattccaattttcacccaaagctctggcaaatggatcctgaatcctgcaatcacaagtaacgctgataacaagccgtttctaggagttatcgcggcggatatcgcttccttgaaaacagacaaaaacattcaaggaacaactttcccgagtttcatggacggaatcattaccgaagtggcgacggacgctagtaaaagtagcgcaacttctacggcagacacgcaagctttaaattccctttctgaatcaaaatcatctcttgaaggagttaatattgacgaggaaatgacaaatatcatgcaataccaaagttattatgtggccaatacgaaagccatgaacacagtgaacgatatgatgaaagctctcttagccatgttataaggaggaaaataatgcgaatttcaacgaatcaacaagcaaattcaataattaatcagctgaataatgtctcaggaaaccttgcaaaataccaattacaagtatcttctgggaaaaagtatgaatcgatgagcgaaaatcctggtgcaacagcgcaaattttatcctataatcatgtgcttagtcagctaaatcgcgaaaaaacggacgtaaccgaagcaaaatcattattaaatacggctgaaacatccctttcatccatgtctacatcgatgaaccgggtaaatgctttagtcttgcaagcgattaacggcacgagcgataaagacaatatgtcgcaatcagccgaagaaatcaaaggtttactggatgttcttatttctgtcgctaactcagaagacgatggcagatatgtttttagtggttctagcacgagcgtgaagccatttacaacagataaaaccactggagaaatcatctataacggaacaacagaaaataaaaaattccgcgtaacggacacattagaagtagaagttttccatgatggtagtgcgatgacggatgtttttaacaacattcaaaaaatcgttgacgcaatgaaaactggcgataaagatgctttgtctgccttgcaagaaacaaacagcaagaatattgaaatcatcaccaattcgatgacaaatatcggcggacagaaaaacggtgtagcagcctatgataacgtactttctagcaaaattgtcgacttttccgaacgtaaatccaatgtcgaagaagtcaatatgccagaagctgtaagtaatctaaataaaacatcgattgcataccaagccgcactacaatccagtgtgatggtacaaaaattaagcattctaaattatatgtgaggtgagaccaagtgggaagttcgattgcaagcagtttaatggacccaacgctaatactattcgcaatttatcagtcttcaaaaagctagtttggaaaaagcgaaaacgccttatcaaaaccaaatttccagctaccaatcacggattgatctttatgctagtttgaaaaatgctttatctgagtcgctgaaaacgatgagctctttcacgacttatgaaagtaaaaccaaacttgcgacttcatccaacgaaacgagttttactgtttcatcaacgagcagttccgtcaacggcagttattctatcgaagtccaaaacttggcgactgcagacacatacaacaaagcagtacctgatattgaggcaaaaatcggtgtaagcgggacaatcaaaatcaatggcaaagaaattaaagttgatgcagatagctcaatgaaaaatgtgatgaactccatcaatagcgctggagctaaggtgaatatctacacgctaggcgaaaacatggtcgtaacttcttcaacaaccggtgtcgaaaacagtattaaatttgaaggcgattcggctgttctcgatgcacttggtttagtacaaaattccccagaccatttagctgcagaggacgccaaactcagaatcaacggagcgaccgttacaagtgcaacaaacaaggtaaccaactacatcccaggcgtgaccatcaacctcaaaaaagaaacaactggcgctgaaaaattaaccatccaagaccaaagcgatgaaaaagcagccagcatgatcaccagttttgtaaatacatacaatgcactaacaagcacaatgaaaacctacacgggaaaaggaaccattttacaagcatctgctgccgacctcgaagcaaatcgcgccttaaacaacgtattccaacataaaaaagatgggaataca

SEQ ID NO: 3869 - DNA, 8415 bp, Listeria monocytogenes 4b
  misc_feature (1)..(end): n can be any nucleotide: a,g,c or t/u
gagagagataataatgagtattgttgtacttggtggcgctggctatatcggttcacatgcagtagatgagttaattactcgcggatatgaagtagtagttattgataatttaagaacagggcacaaggaatccattcatacaaaggcaaaattttatgaaggagatattcgagataaggcatttttaagttcagtttttgaaaaagaaaaggtagatggtgtgattcactttgctgctagttcacttgtaggagaatcgatggaagtaccgcttgtttatttaaataataatgtttatggtacgcaaattgtcttagaagtgatggagcaatttggtgtgaagcatattgtcttttcttctagcgctgcaacatatggtgagccagaacgagtaccgattacggaagatatgccaacaaatccggaaagtacttacggcgaaacgaagctaatcatggaaaaaatgatgaaatggtgcgataaagcgtatgatatgaaatatgttgcactccggtattttaatgttgctggcgccaaagcggatggttcaattggggaagatcacaaaccagaatcacacttagtcccaattattttacaagttgcgcttggtcaacgagaaaaattagcgatttacggtgacgactacaatacgcctgatggtacttgtattcgtgattatgtacaagtagaagatttaattgacgcgcatattaaagcgctagaatacttgaaaaatggcggggaaagtaatattttcaaccttggtagcagtaacggtttttcagtgaaagaaatgcttgaagcagctcgtactgtaacaggtaaagaaattccagctgaagttgtaccacgccgtgcaggagatccaggaacgttaattgcttcaagtgataaagcgcgtgaaattcttggttgggagccaacttatacagacgtaaaagatattatcgccactgcttggaaatggcacgtatctcatccaaatggctattaataacttatgaaggaatgtgatttttatcgaagtaatgaaggagcgatttggggagtttgagggagaaactgtttggaagtggacgatggtaaatgatcatggtatgcgcatgagtgttttaaattacggagcgattgttacttcccttgaaacaaaagataaatttggtgattttgcgaatattagtcttggttttacaaatttagatgattatttggcacactccccatacttcggcgcgacacttggccctgttgctggacgcattacaaatgggcaatttagtttggacggtaaacaatttcaactgattcaaaatgaaggagctaaccatcgtcacggtgggaaattcaattttagtaagaagctttgggatgtttcagtagaaaaaagtcttgatcaaattgtgatgacttttgaatactgctgggcggatggagaaaatggctatccaggaaatattgatgcaaaaatgacatatacgttaaataataaaaatgaatggctgcttgattatgaagcgaaaagcgatcagccgactatatataacccgagcaatcatatttattttaatctaagcggagaagctggttcaacggttttacaacatcagctttgggttaatagtgacagcttcctaccaattgatgaagagtttctcccaattggggaaaagcggttagcggaaaatactatctttgatttgcgtgcaggtcgtgaagtagcggagattacacaaagtcaggaccagcaagtaaaattagttggtgcggggctggatcatgcattcattttaaaacatgaaaatagtcgtccagatgcagttttgtttgatccaaagtcaggacggcgcttggaaatggaaaccaaagctgactcggtattaatttatacggcgaatagtttggatggctcttttgagattggcgagcgaactgtgccaaaatatgctggcataacaatggaaacacagggtttagtagatgcgattaaccatgacggatttggtgatattgtacttcgaccagaaaaaccttttacatctagaacagcttttcgtttcacagtggagagctgataaattttaattaaagagttctaaatgaaggagtgtagagaatgaattggcaagaagaatatcaaaaatgggttgctaatgacaaattagatagcacattaagaaaacaattaacgaatatggaagcaaatgaaaaagaacttgaggatagtttttatcgtaatatggaatttggaacggctgggatgcgtggtgtactaggcgctggaacaaaccgcatgaatatctatactattcgtaaggcttctctaggtttggcgcaatttgtggcggagaacggtgacgaggctaagaagcgcggaatagtaattgcgtatgaccctcgtcatatgtcacgcgaatttgcttttgaatcggcggcggtattagggcatcatggtgtgaaaagctatgtttttgatgcgcttcgaccaacaccggaactttcctttgcagtacgtcatttaaatgcgtttggtgggattgttattacagctagccataacccaccagaatacaatggctacaagatttatggtgaagatggcggacaaatgcctccaacaggggcaagtgctgtaattgaatacataaacgcggtagaggatattttttctgtagaagtagcgaaccaagagctattaattgaaaatggtttacttgaggtaatcagtgaaaaagtagaccgtccatatttggaaaaattaaaagaggttattgtcaataaagagcttgttcaagaacgaggggaggatttgaaaattgttttcacgccccttcatggtactggcggaattcttggcgttcctgcgcttgaaagtgttggctttacgaatattgttaaggttgacgagcaatttgtgaatgatcccgattttggaacggtaaaatcgcctaacccggaaaaccgcgaagcctttttacttgcgattgaatatggtaagaagtttggtggcgacattttagtcggaacagatccggatgctgaccgtttaggtgtggcagttcgtaatcttgacggcgaatatgaagtgttatctggaaaccagattggcgcgattattttacattatttattaaaacaaaagaaagcgcaaaatgaattgccagctaatgcagcggtattaaaatctattgtaacaagtaatcttggaacagaaatcgcgaaacattacggtgcggaaatgattgaagtattaactggtttcaaatttattgcagaacaaattaagcactttgaagaaactggcaagcatacgtttgaatttggttatgaagaaagtaatggttatatggttaagccgtttacgcgtgataaagatgcgattcaagcggtgcttgcgattgcggaagtggcgctcgttagcaaagtagaaggtggaagtttactagaagatttagagcaaatttatgctgagtttggctattacaaagaagatctagtttccttaactttaagcggtaaggatggttctcggcgcatcaaagaaattacaagtaattttcgcgagcaactaccaacaagtatgggtggattccccgtggaacgtgcggaagattatttaagaagcgaaacaacttggattgctaccggaaaaacggaagcgattcatttgccaacagcagatgtcattaaatgttattttgaagatggttcatggttctgtttacgtccatccggcacagaaccgaaaatcaaattctactttagtattcgtggtgaaagtaaagaagaaagtgcaacaaaattagaaaaagtgaaagctgatttgatgcaacatatcgaagcttaaaaagaaaaatcccggaaactcgctttagagacttttccgggattttctagtgagaagtgtgctaaaatggaagatagatattatttgtgcgaaaggatgaggcagatatggcttctaaacaattaaaattagtaatcattactgggatgtctggagcaggaaaaacagtcgcaatgcagtctttagaagatctcggttatttttgtgtagataatttaccgccaagtttacttccaaagttctgggagctaatgaaagaaagcgataaaatggataaaatcgcgctcgtaatggatcttcgcggccgtgagtttttcgattccattgaaccagcgctagatgagctagataataccaattttataacaacgaaaatcctctttttagaggctgatgataaggtacttgtttcgcgttataaagaaacgcgccgccaccatccactggagcctaatgggtctgtgctagacgggattaatgcagagcgcgaactgcttagtgatttaaaaggccgttcgcagttagttattaatacatcgaatatggcgccacgtgagttacgcgagcgaattaacaatgaattccaaaccgaagataaagatatattcaatgtgcaattgatgtcatttggtttcaaatacggcattccgattgatgctgatttagtgtttgatgtgcgctttttaccgaatccgcattacattgacaaaatgcgtccgttgacaggacttgatgaagatgtgtatgaatatgtgatgaaatggccagaaacgcagacctttttagataagttagtagatctattaatgtttacacttcctttttacaaacgagaaggaaaaacacacttagttattgccattggatgtactggaggacagcatcgttcagtagctttgacagagttcgttggtaaggcaattcaacaaaaatatgaaacaacgatttcacaccgagatatgaaacgtagaaagggccgttaatatgaaaaaggaaatgaaacctaaagtagtagtaatcggtggcgggaccggtcttccagtcattttaaaagggcttaaaaagaaggatattcatttaacggccattgtgaccgtagcggacgatggtggtagttctggtaaaattcgcgagcaaatggatgtgcttcccccaggtgatatacgcaatgtcatgctagctttatccaatgttgatccacgggttgtcgatttatttcaatatcgttttgcggtagatggtgatttatcggggcatgttattggaaatttgattttaacggctttatcgcaattgaatgatagttatgttgatgcgattaatgtgctagcaacggtgctgaaaatccgcggcaaagttattccagcaacggatcaaccactcatcttaaatgccgaaatggaagatggttctattgtgcacggtgaatcgcttatcccgttacaaggaaagcatattaatcgtgtgtatatcgaaccagaaaatgtaaaaccatatccgacagcagtcgaagcagtgaaagaggctgatttgattgttattggtccagggagtttatacacaagtattttaccaaatctattacttacggaattagctgatgaaattatagcaagcaaggctccgaaagtatacattacgaacattttaacgcaaattggcgaaaccgactttttctcagatgcggatcatattaaagttatccatgagcatgtgggaaaatcttttatagataaaacgttaattaatacgacgactgttccgaaagaacttttattcccagaggatgttgcgcaagtagagcataatgccaaaggaatggaagagcttggcgtagaagccatttatcaagattttctttctacagaggatggccttgtgcgccatgccgctgaaaaggtggcggacgcgcttttagcgatgttacctaaccaaactattgaaaaggagtgagtaagccatgtcatttgcatcggaaaccaagaaagaattaacccatatggacgtaagtgatagcgatgcaaaagtggaactcgcagcttttattcgaatgaatggtgccatctcgttttcgaatcaattagtgataatggatgtccaaaccgagaatgcagccatagctagacgaatgtatcaattactgaaagacttatacgaagtgccaatagaacttcttgtacgtcgcaaaatgaagttgaaaaaaaataatgtttatatagttcgcttgaagtcaggtacacgggggattttggaagatttacggatactagagccaccgatgacgtttacgaaatcgattgataggggatttgttaagaagaggagcgccaaacgtgcttatttacgtggagcctttttggcaagtgggtcagttaataatccggaaacttcttcttatcatttagaaattttctctgtttatgaggagcacaatgaggcgatttgcgctttgatgaatcaattcgatctcaatgcgcgaacgcttgaacggaaaaatggttttattacctatttgaaagaagcggaaaaaatcacggaattcttgagtattatcggagcaactagcgcgcttcttcattttgaggatgttcggattatgcgtgatatgcggaattcggtgaacaggctagtgaactgtgaaacggcgaatctcaacaagacaattaatgcggctgttaggcaaatcgataatatcaagtatatccaatcaaccgttgggctagaagctttaccagaacgactgcgtgagattgcagcgcttcgtatagctaatgaagatgttaccttaaaagagctaggcgaaatgctgacaacaggtcaagtaagtaaatcaggtattaatcatcgtctccggaaactagatcagattgcagagcgccttagaagcggggaaacaccagcacaagtaggactgaaaatcagtaatagttaattaaaaagaaaaggatgcgaattagaatgtccaaattattttcagaatataaattaaaagatgtaacgctaaaaaacagaattgttatgtcaccaatgtgtatgtattcagtagaaaataaagacgggattgcaacagactttcattttgcacactatgtctcgagagctgctggtggtacagggcttgtcattttagaagctacggctgttcaagaagtaggccggatttctgaatttgatttaggactatggaatgacgagcaagttccagctttgaaaaaattagtagatggacttcattaccacggagcaaaagcaggaattcaattagcacacgctggaagaaaagctgttttaccaggtgaaatagtggctccttctgctattgcttttgatgaaaaatcagacaaaccagtagagcttacgaaagaagcaattaaagaggttgtggctgattttaaacgtgccgcttatcgtgcaaaagaagcgggatttgatgttattgagattcatgctgctcatggttatttaattcaccaattcttatcaccaattacgaatcggcgcgaagataattacggtggacctgctggcaatcgatataaaattttaagtgatattattaaagcagtgaaggaagtatgggacggcccgattatcgttcgagtatccgctactgactatgcacatggcggtttgcaactagaagatcatattccttttgcaaaatggatgaaagcagatggcgtggaactaattgatgtgagtacaggtggtttagttaatgtggctccaccagttttcccaggttatcaagtgccattcgcagatgaaattcgtcgcggggcgggtattgcgactggagcgcttggacttattacacgaggcgaacaagcggaagaaattttatgcaatgaacgagcggatttaattattgttggtcgtgaattattacgaaatccttattttgctaaagatgcagccaaacaattaggcgaaacaattgaaggaccaaaacaatattcacgcgcgtggaaataaataaaaagctggaagttcagagtttttgaacttccagcttttttagtagaaattaattaatagttacattccaatcataagagcatacgcctccagtggcataattgtgattatacgagatgtctaatttatactcaccaggacttagagcggatgtatccactgttatagagttgtcctccgcattaactgtcgtcggaagttggactatattagtcccgatatattctcctgtaacttctgggctgactaacatgttaatttcttccatttggaaataaataggtaaatcaatagtacatgtattgccctgattaatagtttgatcaggaagctctccattttgactttgaacataaatagtatctaatacattagaaggtagttcagttaaaaaattataatctaagtttaatgattctaaactaggtaagttggtgtagttaaccatcgtaccggttaaattgttatgtcttaaatttaaatcagttaagttaggtaaattttgaaaatctggtgtattggttaataaatttgcatttaaatctaaaaatgtgagatttggtatattttgaaaatcagaaatagttgtc

SEQ ID NO: 3870 - DNA, 7409 bp, Listeria monocytogenes 4b
  misc_feature (1)..(end): n can be any nucleotide: a,g,c or t/u
gtatgaatgatttgaatggaagtatggagctatatttaagagaacataccgaagaaattattaataagtggctatccaaaatttatgaaaacgaaaacacgtatactagttttgtttactcgccgcgttacaaagatgaactgcgcgctgacagtgaacaaacagcggacttaatcatttcttatttcgctggtaaaaaagcattttttgagaaactcgacaaatggctggataacatgtacgcgcgtcgcatggaaaatgaagtaccattacctgaagttattaccacccttgataaactacgccgtgaatttgtttctgctgttggtgatttttgtattcataatgatgaagtgtctaaatgtgatttctcatcaagtctgtccatggttaatcacgggtttgaccggataaacgaagccttctccgccatgtattacaatgatatcgtcaaacatttagaacaacaacatcgtttaatagaagaaattagcacacccgtcatttctatcacggacaaattagcgatccttcctttgatggggagcgtcgaccgtgaaagagcagaaaagttatccgaaatcacggcaaacaaatgcgtacacttaggcgtggaacaattgtgtattgatttatcaggaattacttattttgatgatgcacttggagaaatgcttaccaacttagtgacgatgcttaaacttcttggtgtcgaggcatttatttctggcatccaaccaaaaatggcacaacaaattaatcgtgttgaattaaacttatctattcctgcctatcattcgttaaaggctgtcttacaagatcaaactagaactatataagaaaaaccgtaagcgattgtattatcgcttacggttttttgattattttcttctaagtgcaattaatccactcgctgaaatggctacgagcagtattccccaaccattaacaagtggtgtatcccctgtttttggtaaagtcgtccgtttgctatctgcgcttattattttatctggttgttctggtttatccggtttatccggtttatccggtttatccggttgttctggtgtttttggtggtactggtacttttggtatttctggttttttcgtgttctcttttgttacggttacgtttagtgcctctgtgctgattttaaatttgactggagtagcatctaaaatatagcctgttggcgcttttgtttcgacaaattgatactcgcctggaagtaaatccgtcaccgttagtttgcccattttgtctgttttaaggtttggttgtagtgtgttgccatctttatcttgtagttcaaattcggcatcagctagtaggttttgtgtgtcgtggtcgactttctctagtgaaacggatcctttgatggcagagttttctttggatagaaataatgattggtgcgcgtcatcaattgtaaattctactggagacgcatcaagcacatatccttgtggagcttttgtttcgattagctggtatgtatcatatttcagatttgaaatagttagtttaccatcgatattagtttttagtcctgtttggactatcgttcctgctccgttgactaatttaaactcggcaccttctaatggatttttttgagacgaatcatctgttttcgttaattcaacagatccggttgtcccttctccacctccgccaccacctgatgttggtgtcgcgacttcgatttcttgcttgataaagttatctcctgtcaattgccctttatttgtgtagttagagagatgctccgttatcggtagaagttgtatagtatgaaattttgacagaatctgttaaatttcctaggtcgactttgaatccttccgttgtttgagtaattgccgatgatggtacctcggctcctggcgtgaagttatcatccggatcaaattcaccgtggaatgctttgatagaattaaaatcaacgacttgttttggtccaataaaatcttcataaacggcattttgaatgttttgtttcgaatagttaactcgaacgacccattggataagctcaggatgttcagcattagcccagccgtatttatataaactttcatccgggtcaatttgatttttaccaccaacgcccacgtcaattgtttctgtggtaccatttactggaaattcaactggaacattttcatttccttctactaatgatttatcccaattagtccaaaaatcgagatatccactaatattggaattttttcaacaaagtctgtaaatgtaataactacttgcccagtcgattttttagcaatcacgtgacctaccgtgttgccatcgtgatctttcaaagaaaagtctaaatctgtaactatcttcagctctggaggtaacacaaattccattgtgtcgccttccttcacattagttgaattggggatttcccaagtatagtgaaccttgatgctgtcgtaataaccgaagtccgtttgaggattgccatctgcgtctaataattccacagttttcaaaaaatcggagccataattagttgctgctttaacaaagttagtctgaaataaaacgtttacaagcaagataacgctaagaaaggctaatccgaatttctttagattagacgtcattgacgtgcgtttcttcataaaaaccatccttttttaattaatttcaatcataatatattgctaattcatagtgattatacattattttttctaaaaatcggttctccttcacaaaaaaagccttctaattgtgaacattttgtgacaattgcaattcttaaacaacctaattaaaacaggcttagataattatctaagcctgttttttctattttcgtttcagcagaagaccacttaatgacaaggctattaggattactcctaagccagcaaaactatttgtatctcctgttttaggaagacttttagttattcttatctgggtcgtttttggactatcctcgctgttttctgatttcttaggcgtaactggtactgctggttttgttggtggcacagttggttcgtatggtactggtggtaacggagtaggcggtattggtgttggtggcactggtgttggtggtactggtgttggcggtactggtgttggcggtactaatgtgttttcttttgttacttttaccggctggtcagtctcaccagcgatgatttcaaaaacaactggcgtcgtatcaagttcatatccaattggggcttttgtttcgacaaattggtatgtacctggtactaaatcagttacgtttaaaacgccattttcatccgtagttaaaccagtttgtaatgtgtttccttctttattttgtaattcgaatgttgctccggctagagttgctttggttgctgagtctagctttgttagttccacggagccaacttctagtgtgttttcttttgttacttttactatttgatctgtctcgcttgcgatgatttcaaaacttactggactgttgtctaacttgtagcctgttggagcacttgtttcgataaattggtaactgccgggtactaaatcagttacttttagaacgccattttcatctgtagttaaaccagtttgtaatgtgtttccttctttatcttgtaattcgaatgttgctccggctagggttgctttggttgctgagtctagctttgttagttccacggagcctgtgttaagcgtattttcttttgtcacggtaattgcttgattattttcaccaatagtaaattcaactggtgttgtatcaagtttgtagcctgtcggggcttttgtttctattaattggtaggtgtcaaatttcagatcagcaatgctaagttgtccgctcgcatttgttgtaatgttttcttgtagcacagtgccttttgaatccaccaacttgaattccgcaccttcgagggttgcttttgttttcgcatcttctttcgtgagtgttactgaaccggttgtcccgccgccttcaccgcctccgcctgatgcaggtgtccaagtggacgtttgcttgggtacaaaatcagttccggctagtttagcggtattatcgtactgggtagacttcccgccatctgttgcggttgttgtataagaaatttgcacagaatccgttaaatctcctagtgctacactaaacccgtcacttgttgcggaaaaattggtgctggaaatagccgcgcctgctgtaaatatccgatctgcggaataagttccatgaaaagctttgatagaatcaaaatttaatgtttgttttgagccgatgatatccgtgaaaacggcatttggaatgttcactttggcgtagttcactcgaataacccaatgaatcagacttggattactagcatccacccaaccatatttgaaaagcgtttctgtcgggctaactggggttttctcaccaacttttacatctatttgcgtcgttccattttcaagaggaaattctaaatcaactgtttcatttccagtaattactttttggttaaaagtggtccagaaatccagttctcctttaatatcggaatgtttttctacataatcactgaaaacgagggtaacttgattggttgccctttttacagtggccgttccaactacttgaccattactatctttcacgtcaaaagcgagatcagttgcgagcgccaattggcttggcagtgtgaaatccattgtgtctccagcttttacgtttgttgaattcggaatagaccatgtgtagtgcacatccatattgtcatagtagccaaaatctgtttgcggcacaccgtctttgtctaagagttctactgtgtttaaaaactgagaaccataactcgttgccgctttcacaactgttgtttggaagattgtgctagcgacgattaaaatacttaagaaagctaacccaactttttttaaaaagtttccgtttttactcattacaaattcatcctttactaatgaagttttgttattatcacatatcatatgacaattgagtaactccaagctatatcacttttcggaagtactgctcctaaaacacccactttatgaacttttagtgactttttttagggctatttatcataaagtacttaattaaacaaaaaagccgaaactcctttatagatagtttcggctttttatagtgactcgcatgctttttaaatctccatttacactgtttgacaatattctgtttttactactattcactatttttagcggtccagaatgagcatttgtatagcctgtgccacaccatcttcattattagtagttgttgtatagttagcgatttctttaatatgctctgtcgcattacccattgcaactcccataccagcatactcaatcatggtaatatcattttcttggtcaccaatactcatgacttcactttgagacaccccaagtttttctgctaaactagcgagcgctgatcctttatttacgcctttttgcaagaactctaggttataaggaacactccggacaacgtaaaatttttctttgatactctctggtaatttttttataacatcggtaattttttcaggtgagtctaatagcataaccttggaaacatgaatagattcaggcgcttcttctacaggtaaatgatatagtggcgtaccaagtagcagggaatcttgacaagtgatttctgtgattttccggcttggtacatacatgtttttcccatcaaaataagtgacgttaacattttccgcatgacaaaatgcataaatttcttctagttcagttttatttaaggttatatctgctaatgttttttctgaagctgtttctaacacgaccgccccattaaacgtaattacgtaatccccttcatctaaaagatctagttcaattaagctttttttaattcctgcaagtggacggcctgtacataatactacttttaccccttttgctttcgcagctttaatagagtcacgcacggctagtgtgatttcgtgtgcgtcgtttaataaagtgccatcaatatctatcgcgataattttatacataatttcctcccaaaatgactaattacttctattctactagaaaattagctattccgccaaaatccggccacttctcgggagatatcgtctgtggtcttcactgttttcgcatgattccagtgcgtagggaacaacgctcggtaacgatcggcagaaaatcgttcttctattaacaacactacgccacgatctgattctcctcgaataacccggccaactgcttgaagcaccttattcattcctggtatctgatatgcataatcaaatccccgaccaatcgtttcattataataatctttaattaaatcagattcgtgattcaattgcgcaagtcctacaccaacgacagccgcaccgactaatcggttcccgcgaagatctaccccttctgaaaaaacgcctcctaaaacgcaaaagccaatcaaggtttctacattctctgcatgaaaatcttctaaaaaatgctctcgctgcttttcatccatagcagtctcttgtttttgcaacctgatgttaggatatttttctttaaataaatcatataccttttgtaaatatagaaatgatggaaagaaaaatatatagttaccgtttttcccagagacgagagcatagagagcatccacgacagcttccatactattttcacgcatttggtatttcgtactaatataatccgctactagtaaatgcatgtttttttgtttaaatggcgaagaaaagatcattctactagtgtcttcttgaccaccaagtacatttgtatagtaatctattggtcgaagcgttgctgaaaaaagcaccgaactgcttccgagttttagcctctctgataataagaacgccggatccaaacatagttgttttatttctaaatccctgtgatttctcgtaacttgtgtgacgtaacgctcatcataaaactccgcaatggcagtatatcttaaactttcaaaataaaggtccaacacatccacttgtaattctgactgagtattttgcggcaaccattccttcgctacaaaggtgaattttaacacagctgcattccaatcaacgagttcacttttttggacataagtcgttttttctaagtcctttagttttttgttaagcacaatcatttctttattcatcacatttattgcatttagcaatcgtttgttcttttttgaatctagtccccgtttgacttgcataactgttgatttttttaatgtcgccgaatacatcgagcgcgcacggtctactaaattatgcacttcatctacaagaaaagtatattttcccggtccttctgcaaaaaagcgttttaagtaaactactgggtcgaataaataattataatcacaaactattacatcacaaaaaagagccaca

SEQ ID NO: 3871 - DNA, 4792 bp, Listeria monocytogenes 4b
  misc_feature (1)..(end): n can be any nucleotide: a,g,c or t/u
ttattcattaaagctggaacgttcgagctatctggtatggcgctcgcggcagttattgggattatcttaaacttagtattaccagccgagcacagatcagcatgacgcatggcgaacactcctctgcagcgtaggaattcacagaggcttttctatgggatgaagtagaaaaggtggcgctttaaatgaaaaatttgttgtcaatggaagcattaaccgtccatgaaatcgagcatttattagagcaggcggcacagtttaaacgcgggaaaaaagcgacttttaatgaacagactttcgcggtcaatatgttttttgaaccaagtacgagaacacatacgagttttgaagtagcagagaaaaagttaggtgtggaggttgtttcttttgatgcagcgagctctagcatgacaaaaggagaaacgctctacgatacactgctcacaatgcaagccgtcggggtcaatgtcgcagtgattagacactcagaagaaaattactatgcgggactcgaaaaattagacattgctattgtgaacggcggtgatggatgcggtgaacatccgagtcaatcactacttgacttatttacaataaaagaacaatttggtacttttcagggtttgaaagtagcgattgctggtgatattcgtcacagtcgagttgccaattccaatatgaaagtgttaaaaagacttggtgcggaactgtttttctccggaccgagagaatggttcgacgaaagttacttagcatatggcacttacttatcggttgatgaaattgtggaaaaagtggatgtgttgatgcttttgcgtgtacaacatgagcgccatagtggaacagatgagtttacgaaagaaagctaccacgaaaaatttggattgacggaaaatcgggcaaagcagttaaaagaagatgcaatcattatgcacccaagccctgtgaaccgagatgtggaaattgctgatagtttagtagaaagcgaaaaatcacgcattgttacgcaaatgacgaatggcgtttttataagaatggccattttggaagctattttaaaagaacaggaaatgagggcgaaattatgtacgtattaaaaaatgggcaagtattaaacgcgtcaggtgaactggaaaacaaagatgtacttattcaaaacggtaaagtcaatttgattgcggattccattgaagtaacaagcggcgaggaatttgatgcgacagggaaattaattgccccaggttttatcgacgtccatgtacatcttcgtgagccgggcggggaacataaagaaaccattttaacaggaacacaagcggcggcacgcggtggctatacgacaatttgttcgatgccgaatacaaaacctgttccagattccaaagaagtaatggaaagtttacaagcaaaaattaaagaaacagcgaaagttcgcgtgttaccatatgcttcgattacaacaagcctcggaacggacgaattagttgattttgaagctttaaaagaagctggtgcatttgcttttacagatgacggggtaggcgtgcagttagctggaacaatgtatgaagcgatgaaacgagcagcagcactagatatggcgattgtggctcactgtgaagataactcacttatctatggtggcgttgtccatgacgggatttttgctgaaaaagaaggtctgaaaggtattccgaatattgctgaatctgtccaaatcgcacgtgacgttttactagcagaagctgcaggttgtcattatcatgtctgtcatatttcaacaaaagaatctgttcgtgttgtgcgagatgcaaaacgggcgggaattcgtgtcactgctgaagtttcaccacatcacttaattttagatgaagaagctattccaggaaatgacggtaattggaaaatgaaccccccacttcgtagcaaagaagatcgggcggcacttttagaaggcttactggatggtacgatagattttatcgcaactgatcatgctccacacgcagcggaagaaaaaaatgtaccgatggagcaagctgctttcggaattgtaggtctagaaacggcattcccattactatatacccattttgttaaaacgaaggaatggacattaaaacagctaatcgactggatgactgtaaaaccagcggaatgctttaaactcccatacgggaaattagaagaaggcagcgtagcagatatcgtcgtacttgatttagaaaaagaagcgaatattgacccagctactttttattcaaaaggaaaaaacacaccatttgtaggagaaacgtgtattggatggccagtagcaacgttttcggaaggcacacttgtatacaatgagggggaaattaaatgacaaagcgaattttaatgctagaagatggcaattattttatcggtgatgcgattggtagtgaaaaagaaaccattggtgaagttgtcttcaatactggaatgactggctaccaagaaacaatcactgacccttcgtactatggtcaaattattacttttacgtatccacttgttggaaattacggtgtgaaccgcgacgattttgaatctatcaatcctgctgtgaaaggggttgtggttcgtgaagctgcagaatttccttccaactggcgcaatcaaattactttagatgaatttttgaaagaaaaaggcatcccgggaatcgcgggaattgatacgcgtaaactaacgaaactaattcgtaaagaaggaacgttaaaaggcattttagcagctgaaactgcaaacaaagaggaattgctacaccacttgcgctctgtacgtttgccagtcgatcaagtacatgaagtttcctctgctaaagcatttgcaagcccaggagatggtaaacgagtggtgcttgttgattatggtgtgaaaagttcaattttacgggaactgaataaacgtaactgttacgtgacggttgttccttacaacacaacagccgaagaaattcttgcaatgcatccggatggcgtgatgttatccaatggacctggggatccgaaagatgtgccagaagcattagaaatgatacgcggcattcaaggcaagctcccactattcggaatttgcttagggcaccaactgtttgcacttgcgaacggagcagatacatttaaactgaaattcgggcatcgtggcgcgaatcatccggtgaaagaactagccactggacgtgttgatttcactgcacaaaaccacggttacgcagtagaaaaagattcacttattggaacagatttaaaagtaacacacattgaattaaatgatgaaacggtagaagggctggcacataaagaatatccagcctatacagtacaatatcacccagaagcaaacccaggaccaagtgacgtcaactacttatttgatgaatttatggaaatgatgaatgggaaagaggagggtgaactacatgcctaaacgtgacgatataaaaacaattctagtaatcggttctggcccaattgttattggacaagcagcagagttcgattatgctgggacacaagcatgcctgagtttgaaagaagaagggtaccgggtagttttagtgaactcaaatccagcgacaattatgacggatgcagaaatggcggacaaagtttacattgaaccaattacgcttgattttgtatcgcgcattattcgtaaagaacgtccggacgccattttgccaacgcttgggggacaaacgggattgaacatggcgatggaactttcagctgctgggattttggatgaatgtaacgtagaagtgttaggaacagatttaacggcgattaaaaaagcggaagaccgtgaagctttccgggacttgatgaatgaactaggggaaccagtgccagaaagtgacattattcataatttggacgaagcgtatacttttgttgaacgtatcggctacccagttatcgtgcgcccggcatatacgcttggtggttctggcggcgggatttgccacaatgaacaagaattaattgaaacggtgacaagtggtctaaaactgagtccagtaacacaatgtttactagaaaaaagtatcgctggttttaaagaagtggaatatgaagtaatgcgtgatgcgaacaataacgcaatggttgtttgtaacatggaaaatattgacccagtcggcatacatacaggagattcgattgttgtcgcaccaagccaaacgctttccgaccgcgaataccaattgttgcgcgatgtgtcgttgaaaattatccgtgcactagaaattgaaggcggctgtaacgttcagctggcacttgatccagatagttataattactatgttatcgaagtaaacccacgtgtgagccgttcctctgcgctagcttccaaagcgaccggctacccaattgccaaacttgcagctaaaatcgcagttggcttaacactggatgaagtgagaaatccagtaacaggaacaacttttgcccatttcgaaccaacactagattatgttgttgcgaaaatcccacgctttgcttttgacaaatttgagcaagcggatcgtcgccttggaacacaaatgaaagcaactggtgaagtcatggcaattggccgttcatgggaagaagcacttctaaaagcagtgcgctccctagaaattggcgctgaccatttgttgcttgaagaagcggaaaatgctgacgaagcaacattagaacgcaaaatttgcttcccagaagatgatcgtttattcttcctagcagcagctttgcgccgaggtcaaacaatcgaacaactccac

SEQ ID NO: 3872 - DNA, 5121 bp, Listeria monocytogenes 4b
  misc_feature (1)..(end): n can be any nucleotide: a,g,c or t/u
attgcgattgtttctcctaaaatggcgaaactaattgaagaagacaaatgtgaagcatacaatttaccacaaggtgtaattacgcaattgtatcgtgaaattgcagctaaacggccaggcgtgattacaaaaattggcatgggaacatttgtagatccacgtattgaaggggcaaaaatgtctgcgagttctaaagacaacttagtagagctattgacgattcacgacgaagaatggctattttatacaagtttcccaattcaagttgcgctcattcgaggaactgtggcagatgaatttgggaacttaacgttagaaaaagaaggcttacatatggaagtcttaccaattgcacaggcagttcgaaattcaggcggaattgtaatcgctcaagtagaatctgttgcgaaaaaaggatcgcttaatcctaaagatgttagagttccaggaattttggttgatcatattattatttcagaaccggaaaatcattttcaaactgaaaatacacagtacaacccagctttttcagggcatattcaagttccgcttggagatattgagccacttccgttagatgaccgtaaagtaattgcgcgtcgttcagcagcagaactagaaccacaaactattctaaatttaggtgtaggaattccggtgaacgtatcaactgtagcagcggaagagggcgtgagtgatcaattaatactaacaacggaagctggttctgttggtggtgttccagcaggtttagcagatttcggccatgcttataacagtgaagctattgtcgatcatcattcgcagttcgatttttacgatggtggaggactcgatttatccgtacttggtttggcgcaaaccgacgaatccggtaatgtgaatgtcagcaagtttggctcaagagttgctggctgcggtggatttattaatatctcccaatcagcgaaaaaattaatttttgccggaacttttacagcaggtggattaaagacgcgtgtagctgacggaaaattagagattttacaagaaggaaaagctaaaaagtttatcaaacaagttcaacaaatcacatttagtggcgaatacgcttcaacgaccgaccaaatcatcctctatgtgacagagcgagctgtattccgtttagaaaatggcaaaatggttctaacagaaatcgcgccaggagtagatttagaaaaagatatccttggacaaatggaattcgaacctgttattgcgagtgatttaaaagtaatggatagcggtatgtttagtgaacaatggggcggcttaaaaactattattgaaaaacaaacaagagagggagtatctatatgacaaaagaaataaaccgttggggagtcttaattggctctgttggtgttctgctttgtaccggtgcggtatatgcatttagtgtttttgctggaccgctaagtgccgctcatggttggacaattccgcaagttatgatggcatttacaattaatgctgcgattggaccgattccaactattttaggtgggattttaacggataaagggaaagcaaaatgggctattttaattgggggaatcctgtttgggcttggttttgcgttaacaggatttgctacttcaacgacgatgctttatttgtcttatggtgtccttgctgggcttggacaaggttttgcgtattcaggatgtcttagtaacacgattcgtcttttcccagataaacgtggtcttgcttctggacttattactgcaggaatgggtggagcgacaatcattgctgcaccgattgcgaaccacttaattgaaacatataacgtaatgacagcatttaaaattatgggagctgtttatatcgcagttgtcattggatgtagtttccttattcgcgtcgcaccagctggttatgcaccaaaaggttggacaccgcctgctaataatgcagctggtatggtaaatgtaccttggacgggaatggttcgaacagttactttttatctgattcttttaatgctaggtattggcgcattttccggtctgatgattgcttctaatgcatccttaattggtcaaaatatgtttggcttgacggctgcatcggctgctgcttacgttagtatttattcactaagcaactgtttaggtcgagtagtttggggcgctgtatctgaccgtctaggtagatctaatacattgatgattatctatacagtgattgctttatctttactagcacttgcaacgcttcaatctgttgttggatttgttatcggaattattggacttggactttgctttggtggaacaatgggcgttttcccgtctatcgttatggaaaattacggtccgaaaaatcaaggcgtcaactacggaatcgtcttcattggttattccacagcggccttctttgcaccaaaaatggcagcgcaaatcgccggtcaaaacggtggcgacttcacacaagctttctatatagctatcgcacttgctgctgtaggactttgcattaatattgtttataaattacgtgagaaaaaacaaccaactaaagaattagcgtaaaaatagagaggagaaaagaaaatgagtttaactgaaatgctacaaatcaaatatccaattttacaaggggcaatggcacaaattgccacatatgaattagcttccgcggtatcaaatgtaggtgggctaggaattatcgcatcaggtggaatgtcagcagacacattacgagaacaaattcgcctttgtaaagaaaagacaacaaaaccgttcgctgtaaatatcatgctgatgatgccaaattgtccagaacttgtcgatgttattattgaagaagatgtgcgagttgttacaactggggcaggcacgcctaaaccatttatggaaaaatttaaagcagctggaattaaagttatcgccgttatcccgtctgtgaaaattgctcaaaaaatggaagaaatcggtgtggacgctgttgttgcagaagggacagaagcaggtggacatgtcggagaaacaacaacgatggcactcgttcgtcaagttgtttcagcagtaaatattcctgtcattgcagcaggcggtattgcagatggtcacggaatggcagctgtttatgcgttaggcgcaagcggtgtccaaatcggcacacttttccttgttgctgaggaatgtccggttccagctagctttaaacaagcggtacttgacgcaacggatacaagtacgactgtaacaggtcgtcgcaatggtgcgccagttagaagtattaaaaacccaatgattcaaaaatatgttgaactagaaaacgaaaatgcctccagagacaaattagaggaattaacacttggctctcttagaaaagcagtacatgaaggtgacgttgagaatggttcagttatggctggacaaatttgtggtatgttaaaagaaattcgttccactagtgatattatcgaaagcctcatgaaagaatctaaacaagttgcaagcaatttagtgattcaataataaaaagagtcagtaatatcctggtggattttgctgactctttttttatttacgtcgatacatttttgttaagtctaccatcaaataaataagtagaacagctgtaatgatgacagcgataaggcttgctatatcattatggaataaaatactgattccattaattgctagtgcgatcaaaattataataaaatattttcccattaagcttctccagttcttctaattataaagcgccatcttgaatgatttctgttttataaccatctggatctgttaagaaataatagaatggatcttcgccaggtagtccttttaaatctgtcacagtaaaaccagcttcttggtgttcttttaataaagcatgtacgtccggaacaccaactgctaagtgaccataaccatttcctaaatcgtaggcttctttttggtcgtagttgtacgttaattctagttcaaaaccgccttcttcaaacgccatatatactaatgtgaattcgaaatccgggaagtccttgcggcgaacttctttaagtcctaatgctttttcgtaaaaagtaatcgattctgttaggttttttacgcggatacatgtatgtaacatttttgcagtcatttttattcctccttttaaacttctttcttcattgtagtatatctcggaagtgaatacaaacaaggaatattgatggaagtaaggtggctttttaggtataatgatgaatgtgaagaaaggcggaagtgaaatgacaaaaatcaaacgaatcatgacaggaataatccaagaaaattgttatatcatttatcaagataaggtagctttaattgttgacccaggcgatgaagcaagtaaaattgaagcagaaattgcaaaacttgaagtaaaaccagtggcagttttgttaactcattgtcactatgatcatattggtgctttagaagagattcgcaaaacatataatattccagtatatgttagcccactagagcaagaatggttatccaatccagaattaaatttatctgcgcacatagctggtaaagcaattatagcgcaaccggcagaaaatgaatttacgttaggtgaatatagtatagaaggttttcgttttaaagtagtaccgacaccagggcattctatcggaagcgttagttttattttcgatgattttgtcgtagttggcgacgctttgtttaaaggtagtatcggtcgtacggatttatacacaggagatttcgatatgttaataaatagtattaaaacacaactgtttgtacttccagatgacttcccagcctattcaggtcatggtgatgcaaccactatcggtcatgaaaagaaaacaaacccatattttaactaaaaaagaacttgcagaagcatttattctgcagtttttttgtaatcaatggaaaggatgttggaaaatgcattcagatgaggaaattttcaaagaaacaacgccaaaagcattactacaattactaaaaaaagattactactttcatgattattgttatcaagaaattattcctagaggtaaagaaatcaagatgaataattcgaaaggtttccaaatatacttagtcgaaagcggatacttctcttatt

SEQ ID NO: 3873 - DNA, 6082 bp, Listeria monocytogenes 4b
  misc_feature (1)..(end): n can be any nucleotide: a,g,c or t/u
ttggctcccacttagatagcgtcgcggttggcttctgtaaacgtatgaatatccatccattaatgtacctggtaagatgtttgtatcaccagtatccattacgcggattttacgtaacatttgacgaaccattacttcaacgtgtttatcgccaatttctaccccttgcatacggtaaactttttgtacttctgcaagtagatattcttgaacggataatacgtcacgaacacgaatcaaggctttaggatccacagaaccttcagttagagcttccccacgttctacgatagttccttcttctacacgcaggcgagcagtgtaaggaatgttgtaagaacggcggtcatctgtaccttggatagtgatttcttgttgacgatcacgaccttcttcgatagaaacaacttcaccgccaacttcagtgatgatagcttgccctttcggattacgtgcttcaaaaatttcttgaatacgtggaagaccttgcgtgatatcgtctccggcaaccccacctgtatggaaagtacgcatagtaagctgagttcctggttccccgatagattgagcagcgatgataccaactgcttctccaacttcgacttctgtaccagttgccaagtttttaccataacattttttacatacgccgtgttttgtattacatgtgaatgcagaacggatagttacttcttcaataccagcgtcaacgatttgagtggcaattgcttctgtaattaagtcattttcacgtgcaataacttcttttgtttctgggtgacgaattgttttacgagaataacgaccttccagacgttcttcaagtggttcgatgatttcagtaccttcacgaatagccttaattgtaagaccgcggtcagtgccacaatcgtcttcacgaatgataacatcttgagccacgtcaacaagacgacgagtaaggtaaccggaatcggctgttttaagggctgtatcggtaagacctttacgcgcaccatgggtagaaatgaagtactctaagaccgttaaaccttcacggaagttagatgtaatcggcaattctacgatacgtccggatgggtcagccatcagtccacgcataccagctagctgtgtaaagttggaaatgttaccacgagctccggaatcttgcatcatgaagattgggtttaagcggtccaaactcaagatcagttttccttggatttcgtctttggcagcattccatacaccgataacgcgttcgtatctttcatcatctgtaatcagaccacgacggaatgatttagtgattttttcaacagtatcatgtgctttttcaagaatttcatgtttttcttcaagtgttaagatatccgcaatacctactgtcataccggccttagtcgagattttgaaaccaagatctttcatacggtcaagcatttttgaagtttcggtaatatggaatttcttgaagacttccgcgataatgttaccgaggattttcttcttgaatggatcgattagttcttgtgcagcaatgtgagcacgcacatctgttgtagtatcaacaaaatatttagctggtgtttcgatttctaagttgaatttcgttggttcattaatataagggaacgattttggtaagattgtgttgaaaatcaatttaccaacagtcgtaattaataattggttgcgttgttcatcagtgaaacgttcatttggaatcgagccagcaaatacagcaatacgtgaatgtaagtgtacatagccgttttgatacgcaagttgcgcttcattaatatctttgaagatagtaccttcgccgacagcattttcacgttctaaagtaaggtagtagttacctagcaccatatcttgggaaggtgttacaactggtttaccatctttagggttcaaaatgttttgcgctgcaagcattaaaatacgtgcttctgcttgtgcttctgcggataaaggaacgtgaaccgccatttggtcaccatcaaagtcagcgttgtaagctgtacatacaagagggtgaagacggattgcgcgaccttcaactagagttggttcaaatgcttggataccaagtctgtgaagcgtaggcgcccggttaagtaataccggatgttcacggataacttcttctaatacgtcccagatttctggagccatacgttcgattttacgtttagcgctcttaatgttatgtgctaaaccgcgtccaactaattctttcataacaaatggtttgaataattcaagtgccatttcttttggaagaccacattggtacatttttaagttaggtccaacgacgataacggaacgaccagaataatcgacacgtttacctagtaagttttgacggaaacgaccttgtttccctttaagcatatgagaaagggatttaagcggacggttacctggacctgttactggacgaccacgacgaccgttgtcaattagagcatcgacagcttcttgtagcatccgtttttcattttgcacgataatgtttggtgcacctagatcaagtaggcgtttcaaacggttgttccggttgattacccgacgatataagtcattcaaatcacttgttgcaaaacggccaccttcaagttgtaccattggacgaatttctggtgggataactggtagcacgtcaagtaccatccagcttgggttgttgccggaattacggaaagcttccataacttccaaacgacgaattgcacgagtacgacgttgaccttgtgcagattttagttcttcttttaaatcatttgtttctttttctaagtcgatatcggctaagatttttttgattgcttctgcgcccataccagctgagaaacctttaccatatttttcgcggtaaacgcggtattcacgttcagataaaagttgtttcttttcaagtggagtatcgcctggttctgtaaccacgtaagatgcaaagtagataatttcttctaatgcacgtggggacatatccataacaagacccatacggcttggaattcctttgaagtaccagatgtgagaaacaggagctgcgagttcaatatggcccatacgttcacgacggacttttgatttcgttacttctactccacaacggtcacaaactacgcctttatagcgaacacgtttgtatttaccacaagaacattcccagtctttcattggtccaaaaattctttcacagaataagccatcacgttcaggtttaagcgttctgtagttgatggtttcaggtttttttacttcaccatgagaccatgaacgaattttatctggagatgccagaccgattttcatatactcaaaattattaacatctaacaagtgcccaacctcctaaattagtttggagcattcgctttaggaagcgcttggggattcccgcacacttcccagacttttcaggtaaagccttagcgatcgcttaattttatattttgcaaaaaacaaatcattgtttcttattgttttggagtctcaattatcgaaccgaattactcagtcttttcagcggctgcattttccggttgtacgatattgaaggcatcattttgattagtaaagtcgtcatcatccatgtcacgcatctcgatttcttcttcgtctgcggaaagcattttaacatccattccaagactttgaagctctttgatgagtactttgaaggattctggcacaccaggttctggaacgctttcgcctttaacaatcgcttcgtaagttttcacacgaccaaccacgtcatcggatttaatcgttaggatttcttgaagtgtataagcagcaccataagcttccagtgcccatacttccatctcaccaaaacgttgtccaccaaattgtgctttaccaccaagcggttgttgcgttactagagagtaaggtccagttgaacgcgcatgaagtttatcatcaaccatgtgggcaagtttgatcatgtacattacacctacagagatacggttatcaaatgcttcaccagaacgtccgtcataaagaattgttttcgcatcgcgggccataccagcttcttccactgtgctccaaacatcttcttcattcgcaccatcaaatactggtgttgcaacgtgaattcctaaagcacgagcagccatacctaagtgtagctctagtacttgtccgatattcatacgagatggtacccctagtgggttaagcatgatgtcaacaggtgttccgtctggcataaatggcatatcttcttcaggtaaaatacgggagataacccctttgttaccgtgacgtccggccattttatcgccttcgtggattttacgtttttgtacaatataaacacgtactaattggtttacacccggtggtagttcgtcgcctgcttcacgtgtaaagatcttcacgtcaagcacgattccgccgccgccatgaggtacacgtaatgaagtatcgcgaacttcacgtgctttttcaccaaagatagcgtgtaataaacgttcttctgcagttaattcggtaactccttttggtgttactttaccaactagaaggtcgttgtcttttacttcagcaccaacacggataattccacgttcgtcaaggtcgcgtaaagcgtcttccccaacatttggaatatcacgagtcatttcttcaggtccgagttttgtatcacgagcttctgattcgaattcttcaatatgaatcgaagtataaacgtcatcttttacaagacgttcactcatgatgatcgcatcctcgtagttataaccatcccaagtcatgaatgcaactagtacgttacgaccaagagctagttcaccggaatccattgatggaccgttaccaaggatttctcctttaacaacgcggtcaccttccgctacgtttggacgttggttataacaagtaccttggttagaacgaacaaatttacgtaaagtatatttatcaattccgccagttacttctttgccatccactagagatacacgacgaacccagatttcgcgagcttcaacgtgttctacaataccgtcatgtttggcagttacagcagcaccagagtcttttgcagatacgtgttccatacctgttccaacaaatggagcttcagggtgcataagaggaactgcttgacgttgcatgttcgcccccattagcgcacggttactatcatcgttttcaaggaacggaatacatgctgtcgcaacagatacaacctgtttaggcgatacatccatgtagtcaatacgttctttttctaccgctaagttttctgaacggaaacgagccataacttcttcttctgtgaaagtaccttgttcgtctaatttcgagttagcttgcgctactacgtaattatcctcttcatccgcagttagataatcaatcttatcagtaacacggtttgtttcaggatctacgcggcggtaaggcgtttcgataaagccgaatttatttaccttcgcaaaggaagaaagggagttgatcaaaccaatgtttggtccctctggcgtttcaatcggacacatacgaccatagtgagagtaatgcacgtcacgtacttcataaccagcacgttcacgcgtcaaaccaccaggtccaagcgctgaaagacgacgtttatgcgtaagttcgccaagtggatttgtttgatccatgaactgagataactgcgagctaccaaagaattctttgatagaagcaactactgggcgaatattaatcaattgttgcggtgtaattgtagtcatatcttgaatagacatacgctcacgaactacacgttccatacgggataaaccgatacggaattggttttgtaaaagttcaccaacagaacgaagacgacgattacctaggtgatcgatgtcatctgtatcgccaacaccatgtagcaagttaaagaagtagctaatggatgaaataatatcagaaggcgtgatgtgttttacgttttcttcaatatacgcattaccaatgatgttgatttctttttcttcatcatttggtgcgtagattttaatagattgaacgagtacgctatcttccataactccatcagttggacgaagtgtacggaaacctacac

SEQ ID NO: 3874 - DNA, 6535 bp, Listeria monocytogenes 4b
  misc_feature (1)..(end): n can be any nucleotide: a,g,c or t/u
actgtagcaacctgatcgatgcctgagcggccgccactgtgctggaaagatgaatagttgctatacttatgtaagtaaataacattaacaaaggagttttattattatgactaatacatttttagattctattaaagttcgtcgttccatttatgcactagataaaaacgtttccgttgaggattccaaaattgaagaaattattaaagacgctgttaaatatagcccatcttcattcaactcccaaagctctcgcgctgtcattcttttaggagaaaaccatgataaactttggaatatcgtagaagatacattacgcgctatcgtacctgctgaaaactttgcagctacagaagaaaaagttggttctttccgcgctggatacggaacagttcttttctttgaagatactgctgttattgaaggcttacaagaaaacttcgctctatatgcagacaacttccctgtatggtctgaacaatcttcaggtattgcacaacattcagtatgggttgctcttgcaaacgctggaattggtgcatctctacaacattacaacccactaattgacgatgctgttaaagctgaatggaatattcctgcaagctggaacttacgcgcgcaaatgccgtttggtaacatcgttcaagaagctggcgaaaaagaattcatcgatgacgctgatcgtttccgcgttttcaaataataaatgtttcacgtgaaacaaaaaattccgcgaccattaactggtatcgcggaatttttattttgccaaacttttaaatctgcttctaagttcatcacaacttacaataccagcaatcccgcctttaatttctccatcaacaagaacaagcgaatttggtattccttttacatcaaatttctgagctaatgcgcgttgtttatctacattaattttcacaacctggacattaccttcttccatctcagcgaattgctcaagtgttggccaaaagcagcgacacggtgcgcaccactctgcccaaaaattaagtaatattttaggatggctactaataatctcttccaagttctcttcttttgcaaaaataatcgccatacatatccacctcacattcagaatattccaaagttgtattgtggtcaagcaaagggttttagaatagcaatatatcttgctttttgttcattttttgacacttttgtttcacgtgaaacattttatttgctatgtaatatctctaaaatacgtaaatctagcaaaccagtatttttcactgtcatatccgcatcacgaagtccagaaccaacaccaacgcttacaattccagctgcattaattgcttcaattccagcctgggcatcttcaatcccaactacttctgatgtttctaaacctaaaccgcgacatgcttccacaaaaatttccggatcaggttttgatttagtaattttagccgcatcaacaatgtaatcaaattcttgttccatttcaagagcactcaataccgtccgagcatttttcgaaacagatgcaattgcgcatttgagattttgctttttaagatccactataagttctttaattcctggtaaaacatccgctggcgtaatttcttttagcaagctaacataaaagtcatttttatcagctgcaagagcttcaatctgctcttctgtaaagtcattttcgcggccgtctttctttaaaataagaagtagggagtcaattctgcttaccccttttaacttctcattaaatgcttcatcaaattcgattccaatactctcagctgtttttttccaggctaagtaatgataatgtgctgtatctgtgatgacgccatctaaatcgaaaactactccttttaatgctgttgtcattctactcgtcctttccaaactgccgcaacatttcgcgcggttcttcttaaattatttggtgtttctttcagtatattttctaaagttgctggtttggcaatggatggaaatactgcgctgattccgacttcatatactgcttctagtccctcaccaacacttccacaaattgcaaaaactggtgtttctttcggcactactttcgcaacacccacaggagctttcccttgtgcggtttgcccgtccattttcccttcgcctacaatgaccaaatctgcatcctcacaaacagttttgatttgaagtgcttcaataacaaaatcaattcccgataaaaggttagcttttgcaaacgtcacaagtccagcaccaatcccacccccggcacctgctcgcggcattgtaaccatggcgggattcgctaactgataaaactggcgcattgccccatcagctgttgctaaatctgtaacggctagccctttttgtggaccaaacacatacgatgcgcctgcttctccacaaagtgggttttcgacatccgtcacaatatttactgtgatgttttctagttcagctgggactttttcggaacgaatggttgctatatcagctaaatttgcgccaatcgggttgacgatattattttctgcatctaggaattcatagccaagcgcactagccatgccaattccgccatcgtttgaagcgcttccaccaatcccaataataatctcggtcgcacctttttccatggcgtgcaaaattagctcgcccactcctttagtactcacttgaagtggatcgcgtctagtcgtcggaactaagtgcaaaccacaaacttcggccatttctattaaagcttttttgttcccatccgtaaaagcaacttgtgctgaaactgggtcaccaaaagggccggacacatcgattttcatttttttcgcacctaaagctttacttaaaatctctagcgtaccttccccgccatcactgacagggagtaaatgataatcagcatccggataaatttcttgaaagccctctttaatatactctgccacctcatgcgccgtcaaactttctntgaatgaatccggtgcaatgacaattttcataaagacacatccttctgatccaacttaatagttaatgtatctgttaattgatgtttttctccgtgaataactaattctagcacgctttttgtgctatttgaaaggtgtaatctgttttgcgcaatgtcgaccaagattttttcacctttccaagagaattcaaatgccacagattgccaggaatccggtatgtttggcgcgatttcaagtagttctccactagtatctatacccgcaaatccaaaaaccaccgccaaccatattgcgccgagtgaggccgcatggagcccgtcatccgatgaatgcggctcatttccaaggtcaattaaacacgcttcttggaaaaattgataagcttgtgcgcgattaccagttcgattttctacaattgcgtggattgctttacttaaagaagaatcatgaattgttcgtttttcatagtaatccaaattctgcttcacagcatctggcgcaaacatcctcggaaacaggtaaaacaacatgactaaatctgcttgctttaagatttgtagttcgttcacttcttgacgagaataatctagtagaatcccttgtgttccttgtgccgccttatatttatccaaatttatccaatctttttctaagaaagtatcatcttgcggaattaagccagactcatttgcgacaggtaaatagattttttcaagaaaagcttctgcacgggctacaaaatcggcattatctttattccagtctagtgctttttctacattatagtgtgccatataattcgtataagtattattatcgatatgctcggtgtattcgtccggaccaatcacatcaaggatttccagtcgtccattacgattagttgcacggcttagccaaaattccgctgtttcaaggagcagctctgaaccacactctttcataaactgagcatccttagtcgccgtttcatattcacaaaccgcataagcaatatccgcaactaaatgatgctccgaaatcgccgacgctactttttgacgtgtgccagttcgaatattaatcgctgcaaattcaggcgtttcttcttcgccagagaatgcactttcccacggaaaaagcgccccattatagccgtttttcgttgccttttctttcgcttctttcaaatgaaggtagcgatattttaataattgtttggcaatttccggcttattataaaggaaaaatggcataataaaaatttctgtatcccaaaaaacatgccccttgtaaccttctccggtaagtcccttcgcaccaacactacaacgaaaatcatctttcggcgtcataatttctaagtgatagcacgcaaaatctagtgcaaattggtcaaaatcattcgtgctctcaacacggacacccgcatgctcccaaaaatctgcccataaagtttccgaagctcttttcaattctgcataagtcgtatttggaagttccgcatccacttgatccagggatgttttaaccatgcttattttctccaaagtaaatagttgattttcagcgatttcttgctctacttcggtcattaattgtctgtttttcgcagtgaaaatcccttttttattcacttttgttgctattgtaatatgctgtttgctctcgatggtctcatattcgccaaccatcaacttctcatcaaaaattcgtagactcaactccgccagctgctgtgttccaaaattagtttgttgcgcatcaataccagtttttactttgactttcgccgcaccgctcaaaggcattatctccactttagcagcaatgacgtgctttgctgcttttgaaacaaatcggtgaaaattcagttgatacttcttgcccgcgctactttcccaagtaatttttcgaattaattctcctgtattcatatctaaataacgctcgtaagcatggactttccccgcttgcatcgaaaaattttccccatcaagcatcacttggaaacgcgtcacatccggcaaattaacaagttccgaactcagcgaaccgctcggacgattataaatccccgccacatacataccgcgaacttgctccggatattcttcttcaagagcaccgcgcacgcccaaatagccatttcccacagtcatttggctaccatatttatttagataatttaatgcaaattccttctcgattattttcttcataaagaaacactctcacctttttctgccgattcgtataaactttcaacaattttttgtatgatataaccttgttcagcgccagcaagttccacttttccagcaccaagaacgctatcaacaaatgctttcatgctgttttcgtgtttattttcttccagttgtcctaacttctctaacaactgaaattcacctgcattatctgtataaatttcagccgggtataaactgcctcctgctaaatcaccgaaaaaatcaacatttagcgcactttctggcttgatatgtagcgcaaaagaagtatctaattcaattaatccgccattttccagttcaataaagccgaataaagaatcctctaccgtatatttttccggatcccatgaaccaaatgtccccgcacttttcttggttccgattttttgaaaactttttgccgttactttcttcacttttggaaaaccaaggacaaacatcgccgcgtcgagcatgtgaattcccatatcaatcagcggacccccgccttgcatttctttattcgtaaaagttccccaacccggcacgccagaacgacgaagcgcagttgctttcacacaataaatttcacctagaagcgccgaatttctctttaaaaactgtgcttcactggaaaaacgatgatgaaaatcatacgccaaaatcgcgcctttttcttccgcaagttcccacattgctttcgcttccgccgcactcattgcgggtggcttttcacacataacggctgctccattcgctagtgacaacatcacattatcaaaatggaaccgattaggcgtgcaaatactaataatatcgattttctcgaccgcaaacatctcttctgccgtagcataatgcttctcaaaaccattgttcgcacgaaactcttcgccacgctccaaacttgggtcgcaaacagctacaagctccagttcatttcttgtcttataatacgcagcgtggaccttctcagcgacttgtccagcaccgataattgcaactcttttcttcatatccgaaactccttttagaaaaatccgtccgctttaattgggacggattttctattttaaattaaacagctttttaaatgtgccaacgcatctttataagcttgttctggattttcactgcgaacacgacattcaaaagttaaaaatccgttgtaaccgttctttttcagttgatcaaaacttgttttaaaatcaaggctaccgcttcctggttggtagcgatgattgtcagcaacatgaatgtgaccgatcgaatctttatacgtctcaagcacagtcggaatgctatcttcttcaatattcatatgatagaaatcagcgataatttctacaattttaagttcat

SEQ ID NO: 3875 - DNA, 7961 bp, Listeria monocytogenes 4b
  misc_feature (1)..(end): n can be any nucleotide: a,g,c or t/u
agcattatactataactagaaaccaaaccaaaggagctaggatgatgaaaaacttatttttaacctcgtcttttaaagatgttgtgccattatttaacgaatttgaaagcaatctccaaggaaaaaccgttacttttatcccgaccgctagcacagtcgaagaagtagttttttatgtagaagctggtaagaaagcactggagaagttggggttattcgtcgtagaactcgatgttgctacagaaagtttagaccacattgctgcgacactcagaaaaaatgattttatttatgttactggaggcaataccttctttttgttacaggaattaaagcgaactggggcagataaactaattttagaagaaattgctgctggaaaattatacatcggtgaatcagccggagcagttatcacctcacctaatattgcgtacattcaatcgatggacagccccaaaaaagccgaacaattaacaaactatgatgccttaaacttagtcgatttctgcacactcccgcactacaacaacattccgtttaaaaaaataacgcaaaaaatagttgctgactatactaaaagtttaaaaatgcatctgattagcaatcatgaagctattctcgttcgcgatgaagaagtaatcactaaacttgctaccggaaaaacagattgacatccgttaggtttcgatttagaattagttgataatgattatcattttcaactaaagaatggaggaaatcgaaatgatcggaccaggaagtatcgctttaattgtcggagctgcccttgtgattttcggaccaaaaaaactgccagagcttggtagagctgctggagacactctccgcgaattcaaaaatgcgacaaaaggcatgatggatgattcaaaagaagaaactaaaaaagaagattcacgcccgtgactgaagtttccatgagcctcactggacacctgaaagaattgcgaaccagattattaatcatacttctatccttttttctcgctttctttgtggggcttttcgtttccaagccgttaattttatttctccaaaaagatgacttaccaaaagaagtgattttgcacgtttttaaagtgacagatgcttttcaaatctatatcgaaatggcgtttgttatcggactagtcttagtatttccagttattttatatcaattatgggccttcgtaaaacccggcttacatgcatccgaacaacgaattaccctgcgctatattccgattacttttttactttttttatgtggtgtcgttttttcttatgtaattacttttccatccatttattttaaaatttaatgttccaattcgcggcagaacttggcgttgaaacgacgattggcctcgcaacttattttcaatttttactacaaattgtgctttcattcggtgtattatttgaacttccgatggtgattatgctgttaacgagattgtcactgataacaccaaacggaatgcggcgcgcacggaaatatgcttacttctgcttattgattatcgctgcattcatcgctccaccagaaatcttatcacatttgatggttaccattccgctcatagggctgtatgaaattagcattgttgtgtctggttttactgtgcggcgaatggataaggaaatgaaaactgtctaaaatgaattgttaatactaaaagctcgaaatcaaattgatttcgagcttttcaaattatctgtacatttatttgaaaattcaatgtaccatgttatattagattcaacgctataaaagggaggtacaacatgtacaaaatttttagtttcgtttcattaatacttagtatgctatgttttatgggcttacaagttttaaatgtcattcaaaaaaatgtcatattattatcactattagatagcgaagaatttaatgacattcactttttcggaaaaaattggtaatacctgttttatttttagtacttacgattatttttgcctatttaagtataaaatctaatacaaacaagtaatttgatgggttttgaactgttcctctacatctgggtccagtttgaagtccgtaattaaatagtcaatatcatgacatgctaagctttggtgcataaacttgtgtcctactttttcttcggtgacaagtaaaacgagcgaacttgactggcgcctgaaagcttgtttgatgagtgcttcaccttcatgtgtttccgttgcacctttgtcatagtcgatcccccggcatgaaacaaaagcaatatccgcattataagttaaagcgtcattgtatgcttttgcgccgttcaccgtatatcgcttcgttaaaatcgatcctcctaaaatactaactcttgcatttgtaaattctgatagcatggaagccgtcatgaccccgtttgtaataatttgcagtccatcaaatttacttaaaacgtcgattaaatgcagtgatgttgagctagagtctaagaaaatcaccatatcatcgcgaatcagtgatttggcaatatcggcaattcttattttactcgtttcattacttcgctcattcattttcattaaataaggcaaatcgatttttttattatcgataatcattgcgccgcctcttgttcgtctcacaagtccttctttttctaattctactaaatcccgtttaacagtggcttcgctgtagttgacaagctccactaaatcaataatccgcataaattgttccacttttagccggttaacgatttttagttgccgttccttcgctgtgcttaacatgttcctccactccttaaagggcaaaagcactataactagcgcttctccccttcttattagtatttatctctttgaccagtagtatttaaaatgtgtaatttatgtcttacaacttcttttactttttcatttgctgatgggtacacttgatttggttcatacatcgcaggattgtccactaaaacgcggcgaacttcttcaaaaaacacacttttcagatctgaactaaggtttactttcctaacaccgtactgtacagattcactgacttctttatctggatttcccgaaccaccatgaagtacaaacggaatatccaagcgtttatttaattcttttaaaagaggcatattcagttctggttttttatctttagggtataacccatgcgccgttccaatagctacggctagcgtatcaatgccagttctctgtacgaaatcttctgcttggtcagggtcagtatatatgatggtatccgccccgccttctgctgaaccattgttcccgattgttccaagttccgcttcaacagaaacaccgactttatgcgcaagttcaaccacttgcttagtcaacgccacgttctcttcataactggctcttgaagcatcaatcatgacagaagtatagccatttctaattgcccgcatcacatctttgattgttccaccgtggtccatatgaataacgaccggcaccttacttttatgtgcgtattctctgactgttgcaacaaagttatcaccgagatactctatttcatccggatgaatttctaaaattacaggagcattatttgcctccacttcctccattatcgcctttaacatatcaaaactacagatattaaatgctggtaccgcaaattgatgctcttttcctactgctaaaagatctttcattgtatataacattatatcatctcctctttattttttcgcttgtttaatggggtttttaatagtccgacagaaattgctgtcacgactgtgcctgctgcaattgctagtaagtagataaataaatggttaattacatttggaatgaacatcacccaaatcccaccgtgaggcgccatcgaagttacaccagctcccatcgaaattgcagcagctgttgcagaacctaacatcaaacttgggataacccggagcggatcagcaactgcgaaaggaattgctccttcagtaatataagatgcacctaacacccaacaagaattccccgctgttttttcttcttttgtaaatttgtttttaaataatagtgttgcgagtgctaatccaagtggcggaaccattccagccgccatacaagccgcaatcggcgccgttacacctgctgacattaacccaattgaaaaggttgaaatagatttattaattggcccacccatatctgctgccatcatcacaccaatgagtagtccaaatacgacgccagatgtctcaccaagcccattcaaccaacctgtgagtgcatttaaaacccaagcgattggtgtatcaataataaataccatcgccaaaccaacaatcgtaatccctaaaagcggtacaacaatcaattgataaatcgaagcaagtgatttagtgacattgactttattagcaaagaaatgtgccacgtaaccagccaaaataccaccaatcataccgcctagaaatcctgatccaccaacagtcgccagtgtccctgccacaagcccgggcgcaaatcctgctcgaccagccacagaaaccgctatccctgctgcaagggctggaaccattaaaccaaatgcagtatccccaccaatttttgaaaatgcagctgcaagtgcgttatacgaatcagagtcagggtttgaggcatcaattccaaaagcaaaactaatagcaattaaaatcccgccagctatgacaaatggcaacatatagttaacaccattcataaagtgattgtataaacttgcttttgacggttgttccgaacttatatccgaacttttcgcctccaaactgattaaccctttaccagaaatagtttcctcaataaccacatcagcctctttaatcgctctggaagtggatactttttttattttctttccagcgaaccttgatgtatctatttctttatcgactgctaaaatgacataatcagcagtcgcgatgtcttccttcgttaaaacattttcaaccttagctccttgtgtctcgattttcacttcgtaaccaagcgcttctgccgttatagttaatttctcggcagacatatacgtatgcgcaataccagtgggacaagcagtaacaccaactattttcatgtgaaacgcctccttagttcgataaaattgttataatttccgttttgtttttggaattttttaatttttcacgaaattctttgttcattaacttcctcgatagttcacttaggatttgcaagtgaacatctgtggcttttttcggaacaccaataagaaaactacattcaatcggtgaatcatctaatccaaaataatcatttataatgccagaatgaacaaaaacaatcaatggttcttttacatatttactttttgcatgagggatgccaaaaccatcttcaattccagtggaagtttcttcttctcgtttatataagtcacgtataaatttttttggatttgttatagacccttcttcacttagtacttatgctactttttcaaataataattgttttgtttgaatacgattatcaaaaataattcggtcttcattaattaaattcgatatattcataatccacatcctctctcaacaaagtaagcgcttcacttgtttgattacactatatcacgctgaacgacttcattcaatattatgggtgtattatgcaaaaagttcatttttagggctattttggttgtttatatgaacgaaatcaatcatttttatccaaaaaaattgtccgcaagcttgctcccgcggacaatttttcattatttacaagcttcgacgcctttttctaaaatctccatttgtagcaaggtttcttcgtcagttacttgttttggtttcccgttaataattgcatcatacaaaccatcataaacgcggccgtagtcgccaacctcagagattactttctcctcatgccaaactccggcatcatcaacatacgtaagcttccgtaatgctctggtaaatcgattccaaagtctggattacttggcatgtaaaatagttttaaatgttcttcttggcggtcttttgtttcttttgtaaacataccttttttgccgtaaaggacaaagcttggacgggcttttatacggaaatagcttgattttacggatacttttgttacgccataatataaatcaaggtcgaaataatcgttcattcgtccttcgccgagcagttggcgcacgtcataatggatgttgtccggtttgccgaagtaagaaagtacttggtcgattgtatggcagccgtgaccgtataaataactgtcgtagaatttaaattcatgaaccgactctgggatttctggacggaaatagtcataatgcatttctacttccaataaatcgcctaattttccactttcaattactttttgtgctgtaaggaaatcggaatcgaaacgacgattttggtagcattgaacgagtaaatcacgttctttagctagttcgaaaatttctttcgcttcagcgtatgtcatcataaatggtttttcaacaagcacatttttgccgttttctaacaccattttggcatagtcgaagtgagagctttgtgttgtagagatggtaattaactggatttctgggtcttttaacagctcgtctaagtcggttgtatagtgaaccccttcaattttgtcccatgtggctgttttgggatttcgattataaatcgtcttcacttcaatattatcccgctctaaaataaatggtaaatgatatctattcgtactttttccgtttccgataaaacccattttcaacatactatttcctccttattttaacaaactaacaaatttagcttaaacgctgctaatttatcagtgtatatatctcacttgttacccatccatagtactacactaacgcgctatttagccaataaaaaacttgctaaaacgtctgtttaaggcgtcctaacaagtttttattttctattaatcacatcactatggtgtatgggttcttattgtgcttttacaaattctgctgatttgtcgccagcttgacgtccgaaaataatgatttcagcgacagagtttccgccaatacggttttccccgtgcaagccaccagttacttctcccgcagcaaataggcctgtgattggtttaccgtctttgtctaaaacttctgtatttgtattgatttttacgccacccattgtgtaatgaattcctggtccgattttgattgcgtaatatggtgctttagataaatcattatccattgcggttgttctgccgaatgcttcgtcttttttgtttttcacacttgcattccaagtatctaatgttttagttagctcttcttttggtacattgattttgccggctaattcatcaattgttttaccttcttccacaaagcccatttcttcatattgcgcgatagctttgacgcggtctttcacgcctgaatcaaatactaggtacgcggatttttctggtaatttgttgatagaagctgttacgttatcgcgtgtgtctaattcgtttccgaaacgtttaccttcttgagaaactaaaatcgcaccttcaccacgaacggcttcaccgataaggtaagatttatcttgttgaacagttgggtgaacttggatttgatccatgtctactgttgttccaccaagtttttcgatcattttaataccgtcgccagtacttccttcttggttcgttgttacatatccttttaagtctggacgttctttttcaatcatatctttattagctccgtagccaccagttgtgacaactactgcatccgaactaattgttttttcgtctttattgtttaattttactttcacgccagttacttttccgtctttttgtgtaatttctgttacgtctgccctaacaaaaactggnatttctttccagcacnaggggggcagttntactagagtgagagggggtgacgagtcaggtccaagagacagactncntcctcctcnggcccc

SEQ ID NO: 3876 - DNA, 8311 bp, Listeria monocytogenes 4b
  misc_feature (1)..(end): n can be any nucleotide: a,g,c or t/u
ttgaaattgatatggggcatttattgtttcctctgagccaaaacaaattcacggtggtttttgggttaaacaagttcggaaatgaagaggagcttacctttgatggtagcttctttttttatttatttagtgaaattagatacataatgctagtaaaaagagcaaatacgacctaaacacgaacgttaataaaatgtaacaattaaatgttcgatttttcgttgacatttatcgtgcctattgttagaatgaaggagtcgaaaagagattattaaggagttgatcacgtaatgcctgctgtaattggtgtcattatggggagtacctcagattgggatacaatgaaaaaagcatgtgatgtattagatgaattagaaatagcttatgagaaaaaagtggtttctgctcatcgtacaccagatttaatgtttcaatatgcagaacaagcgcgggaacgtggtttgaaaattattattgccggtgctgggggcgcggcgcatttgccaggtatgattgcggcaaagacgactttgcctgttattggtgtgccaattaaatcaaaagcgttgaatggaatggattcgttactttctattgtacagatgcctggaggtgttccggtagcgacagttgctattggagaaagtggtgctgtaaatgctggccttctagcggcgcaaattttatccataacggacgatgcaattactaacagattacaaaaaagacgtgctacactagaagaaacagttctagaaagtagtgattatcttggataaaaaatttttactgacaaatagtactattggtattattggtggcggacaacttggacgtatgcttgctcttgcggcgaaagcgatggggtatcgtattattgttcttgatcctaccgctgattgcccagctgctcaagtaagtgatgaacaaattattgctgactatgatgataaagtagcattacgcgaactttccgaaaaagcagatgtagttacatatgaatttgaaaatatcgactatgatgctttgaaaatgacgcaaaacttagtatctgtcccgcaaggatcggaattgctttcgattacacaggataggattttggaaaaagcttatctggaatcagctaatattaacattgcgccgtatgcggttatagtggaacaagatgaaattgaaaatgaaattaaaagtattggatatcctgctgttttaaaaacggcacaaggtggatacgacgggaaagggcaagtggttattcatgatgcaagggatattgaaacagcagcgagattgttgcgatacggctcttgtgtactagaagcttggattccttttgaaaaagagatttctgtggttgtcgctcgtaatttagatgggcaaatagaaacttttccagttgcagaaaatgtacatgtaaataatattttgcatacaactacggctcctgcagatgtggcagatgacgtgcatgaggaagcggaagaaattgcgagaaagttagcagatgtacttcaattatgtggtgttttagcagtagaaatgtttgtgacaaaatcaggggctatttatgtaaatgaacttgctccaagacctcataattctgggcattttacaattgaagcttgttctatttctcagtttacgcagcatattcgagcgattgttggattgccacttgtaaaaccagaactcttaaacccagccttaatgattaatattttagggcaacatgtcgatgcagtgaataaacaaagggtgaattatccacattggtttgtacattattatggaaaaaaagaagcgaaaatcaatcgcaaaatgggtcatgttactgtgctgactgatgaaccaaaagcggttatacaagatttagaagaaacgcaaatttggaagtaactggaggaatttaaaaggatgttagaacgttatactcgtaaagaaatgggcaacatttggacagaacaaaatcgttatcaggcttggctagaagtggagattttggcttgtgaagcatgggcagagcttggtgatattccgaaagaagatgttgcgaagatccgtgctaatgcaaagtttgatgtggatcggattcatgagattgaactagaaacgagacatgatgttgtggcatttactcgttcagtttctgagtcgcttggtgcggaacgtaaatgggttcattatggcttaacttcaacagacgtagtggatacagcgaattcttatttacttaaacaagcgaatgagattttgcgtaaggatttggaaaatttcattgcgattattggcgaaaaagcaaaagaacataaatataccgtaacaatgggacgtacacatggtgttcacgcggaacctactacttttggcttgaagcttgctctatggtacgaggaaatgaaacgtaacctagaacgttttaattttgcagctgatggtgtggaattcgggaaaatctctggtgcggtcgggacgtatgcgaatattgatccttttgtggaggcttacgtatgtgaaaaattaggaacaactcctgcgccgatttctacacaaacgttgcaacgcgatcgccatgcagaatatttggcaacacttgcattaattgcaacttctgtagaaaaatttgcggtagaagtacgtgcactgcaaaaaagtgaagtgcgtgaagtggaagaattctttgcaaaaggacaaaaaggttcatctgcaatgccgcataaacgtaatccaatcggttctgaaaatgtaactggattagcgcgcgttattcgcggtcatatggttactgcttatgaaaatgtgccactttggcatgaacgtgatatttctcatagctcagcggaacgaattattctgccagattccactattttacttgattatattttgaatcgttttggaaatattgtgaaaaacttgacggtgttcccagaaaatatgaaacgcaatatggacagaacactgggacttatttattcacagcgtgtattactggcacttattgataaaggtttagctcgtgaggcggcgtatgatgtcgtacaaccaagagcaatggaagcttgggaaaaacaagtacctttccgtgaattagtagaacaagatgcaaccattactgaaaatctatctgcggaagaaattgcagattgctttgattacaactatcacctgaagaatgtcgacttaatttttgatcgtttaggattataattacgggcagaatacaacctaacctctttgatatttattttttcaaagaggttaagtaatttataaggagataaattatcgtgactaatgaactggtttatgaaggaaaggcaaaacgactttttaaaacagaagaagcaggtgtcttgcgtgttgcctataaggatgatgcgacagcgctaaacggggtgcgaaaggaatcttttgctgggaagggtgagcttaataaccaaattacatcgcttattttttctcatttagcaggagcgggaatagagagtcattttattcgagcgatttcggaaacggagcaattggtgaaagaagtatcaattattccacttgaagtggttgttcgcaatgtgatggctgggagtcttgcgaaacggcttggaaaagaagaaggcgagctaattccaaatgcgatagtagaattttactataaagatgatgcgttagatgacccgtttattaatgatgaccatgtgctttatttagagcttgcgacaacgagtgagatggatataattcgccaggctgctcgttcgattaataaggtgttacaagaattattcaatcaaatgaatattacgctaattgattttaaattagaatttggtcgggatgcgactgggaatattttactagcagatgagatttcgcctgatacatgtagactttgggacaaggaaacaaatcaaaagctcgataaggatgtctttcgtcggaatattggcaatttaacagatgtgtatacagaagtattgaatagattaaagcaagttcaaaactaggaggccacaaaatgtataatgtcaaagtttatgtcactttaaagaaaagcgtattagatccacaaggtgttgcagtaaaagatgcagcgaaaagcatgggttatgaggaagtagaagatgttcgtattggtaaatttatggaactaaaagttgcaaaatcagatcgagatattcatgaagtattgaatgaaatgtgcgacaaactgctaacaaatccggtgatggaagattaccgatatgaaatagaggaggcttaaacgatgaaatttgctgtcattcagttcccaggttctaattgtgatcttgatatgctacatgcgattcgcgattctcttggcgaggaggcggaatatgtatggcatgcggaaacaagtcttgcaggttttgatgcggttttacttccaggtggattttcttacggagattacttgcgaactggtgcgattgcaaaattttcaagtattatgccagaagttttgcgctttgctgaaatgggaaaaccagtgcttggtgtgtgtaacggattccaaattttaactgaaattggtttactgccaggtgctttaattagaaacaataatttgcattttatttgtaagacggtgccgcttcgtgtggcgaatgcaagtacgatgtttaccgggctttataaagaaggcgaaattatccaagttccagttgctcacggggaaggtaattattactgtgacgatgaaacacttttaaaattaaaagataataaccaaattgtgtttacatatgatagcgtgaatccgaatggtagccgtgcggatattgcggggatcgtaaatgagcgcggtaatgtgcttggaatgatgccacacccagaacgcgcggtagaagaaattattggcggtacagatggtttaagacttttcgagtccgttgtaaaagcttggaaggaggaacaagtaaatgcctaacatggagccaacgacaaaggaaattaaagaacaaaagatttatcaagaaatgggcttaactgatagtgaatatgagcttgtttgttcgattcttggacgcgagcctaattatacagaaactgggcttttctctgttatgtggtcggaacattgtagctataaaaattctaaaccagtacttcggaaatttcctacagaaggcaaacaagtattacaaggacctggtgaaggcgctgggattgtcgatattggcgatggtttaggtgttgcttttaaagtggagagtcataatcatccatcctacgtggagccgtatcaaggggctgcgactggggtcggcgggattatccgtgatgtgttctcgatgggagctagaccgattgcaatgcttaactcgcttcgttttggtgagttagatacaccccatgcgaaatacttagttagtgaagtcgttgcgggaatcgcaggatacggtaactccattgggattccaacggttggtggcgaaatccaatttgatccttgttatacaaaaaatccgctagttaatgcaatgtgtgttggtttaatcgaggcgaaagatattcaaaaagggcaagcaaaaggaattggtaatccggtgatgtatgttggcgctaaaactggtcgtgacgggattcatggtgctacttttgcttctgtagagtttagtgaagaaggcgaacaacaacgctctgctgtacaggttggcgatccttttatggagaaattgttgcttgaagcttgtttagatgtgattcgtgatcattcggatattttagtgggaattcaagatatgggggctgcaggtctcgttagttcaagttctgaaatggcctcaaaagcgggcgctgggctagaattaattatggatgatgtgccgcaacgagaactaaatatgacgccttatgaaatgttgctttctgaatcgcaagaacggatgcttctatgtgtgaaaaaagggcatgtggaagaaatccaagcgttatttgaacgttatggtttagaggctgttgtgattggtcaagtaacagatgataaaatgtacaaaattattcatcatggtgaagtagttgcgaatgttcctgtagatgcgcttgcagaagatgcgccagtttatcataaaccttccaaagagccagctcgttatcaagctttccaagaagaggaatcgtttgtgccagttatggaagatgtggtcggtgtttggaaggaactgcttgctcagccaacgattgctagtaagcgccatatttatgagcaatatgattatcaagttcggacggatacagctgttgtacctggttcagatgcggcgattgttcgtgtgcgtgggaccgagaaggcaattgccatgacaactgattgtaactcacgctatttgtatcttgatccagaagtaggcggagcgatagcggttgcggaagcggcgcgcaatatcgtttgttctggcgggaaaccactagcgattacagatggactgaactttggaaatcctgaaaaaccagaaattttttgggaaattgaaaaagcggctgatggtattagtgcggcttgtttagaacttgatacgcctgttatctctggtaatgtatcgctttataatgaaacagatggtaccggaatttatccaacgccagtcattggaatggttggtttagtagaagatttggcacatattacgacacaagattttaaaaatagtggcgatgtgattttcttaattggtgaaacaaaagctgaatatagtggttcggaattgcaaaaattgcaacaagggaaaattagcggacgtgcgccggaattagatttaacgacagagaaaaaataccaacaattacttctaacggcgattcaggaaggtctagttgcttctagtcacgatttggcagaaggtggatttggtgttgcccttgcggaagcgacttttaaagcagggcttggtgcggatgtagaagtaccgtttgagttgaatcaactattcagtgaatcgcaatcacgtttcttagtatcggtaaaaccggaaaacgaagcagcttttgcgcaattaatggaactggaaaaagtataccgccttggtgtagtaaccgaggatgatacgattcgtgtgaaacataaggaagatcaagttacagcgaaaacaacggaattacgatccatttgggaaggggctattccatgcttgctgaagtaaaaggacttaacgaagaatgtggtatttttggtatttgggatcatcctaatgcagcggaaatcacctattatgggttgcatagtttacaacatcgcggtcaagaaggtgccggaattgtttcgacagacggtgaaacactaaaaggtcaccgaaatctcggccttttagcagacgtatttaaacatggtgaactagacgatttaaaaggtaaagcagccattggccacgttcgatatgcgacagccggtcaaaaaaacttaggaaacgtacaaccatttttatttcactttcatagttcttctttagcacttgcgcataatggaaatttggttaatgcgaaaagtttacgccgtgaactagaagaagaaggcgctatttttcaaacgagttcggatacagaagtgttagcgcatttaattaaacgtagccatacaggtgattttgtggaagatttaaaagttgctttgacaaggtcaagcgttaagggtggcattgcgtacatgcttctgacggaagacacgatgtatgcggcgcttgacccgaatggttttagaccgctttcgataggtcgcattggtgattcttacgtagttgcttcggaaacatgtgcctttgaaacggttggcgctgagtttgttcgcgatgtggagccaggtgaactaattattattaatgatgacgggcttcgaattgaaaaattcacggaaaatgtgacgcattcgatttgcagtatggaatacatttattttgcgcgacctgactctaatattgctggagttaatgtccactcggcaagaaaacgttctgggaaaagattagcaaaagaggcttttattgatgcagatgtggttacaggtgtaccagattccagtatttctgcagcgattggttatgcggaggaagctggtcttccttacgaacttggtctcatcaaaaatagatatgtggcaagaacttttatccagccatcacaagaacttagggaacaaggcgttagaatgaaactttctgccgtgcgcggggttgtggaaggaaaacgcgttgtcatgattgatgattcgattgttcgcgggacgacaagtaaacgcattgtccagcttttacgtgaagcaggagcggcggaagttcatgtaagaatcgcttctccaccactt

SEQ ID NO: 3877 - DNA, 8162 bp, Listeria monocytogenes 4b
  misc_feature (1)..(end): n can be any nucleotide: a,g,c or t/u
tgtcatatggcgttgggccatcaggggttgcagcactttcaattgcattcccagttcaaatgatactaatggcaatggcagctatgtttggtattggtggcgcgtcgattatttcccgctcgctcggtgctggggaacaaaaacaagcggataaagtattccatcaagttatttggttagtacttatttccagcatttttattgcaattgtaacctttatttttttagatccgcttattacgcttttcggagcaccggcagatattcatgatattgccagtgatttcttatcgcttattttgttaggcgcagtgttccaaaccttcgcgatggcgatgaataatatcgttcgctcagaaggtaatgcgaaaacagcgatgttaaccatgattatttccgctattttaaatatgattttaaacccaattttcattatgggctttggtatgggcgttcgtggttctgcccttgcaactgttattgcgcaggctgttggcgcgatttggctcttgatttattttttatcaggaaaaagtactttatctttaaaagggttctcattccgaatggatttcccgctgattcgccggattatggcaatcgggttcccgtcatttattatgatgtccgcaggtagtatcgtaacggttgcggtaaactggatgcttaatatttatggtggaacgatggcgattgcagtatacggaattgcgaaccggattgcgtcgttcgtcatcatgccaatcaatggtgtcacacaagggatgcaaccaatcgtcggcttcaactacggttccagacaattcgaacgcgtaatgaaagctgttaaagtatcaatgatagctgcaactgtcatgtcactaattgcttggggattggtagaaattttcccaggaatgctcgtacgaattttctctaacgacccagaactgattgcacaaggaacaaatgctgttagatttatgctactagctgcgccaacaattggtttccaaattgtctgcggtgggctatatcaagcacttggtcgagcaagaatttcattcatcatttccctaatgcgccaaatcatctgtttagtaccacttttacttattttgccgcagttcttcggtttagatggtatttggtacgccttcccattagcagatttaggcgcgttcaccgtctgtctagtgattatgagcaaaacatggcgccgaatttttaaaaatcccgagatagtttaaggtaaaacgaattgggtattttctaactagtgtctcaaaaacaaaggagcgatttttatggcaaaaatgtacccgtatttggcttttgaaaatgcaaaagaggctttaggatattatgaagaagtgttcggagcaacgaatatttcaaggcttccagtaagtgaggaacaaagcgaaatgtttggcttagcaaaagaaaacctagagaacacaactgttcacggtggctttaccgtccttggcgcaaacttattttgttcagattcatttggcaaagaagtaaaaccatccaatcaaatttcgattatgcttgattctaacagtgaagacccagcggcagtagccgacgccgatgctttctttgaaaaagtgagcagctcagaaagagtaacagtaacgttacctttcgaagagcaattttggggcggaaaaatgggacaattcgtcgatgagtacggaatttcttggatgattcatacgcaaccttattctaaattataaaaaacaagtggaccagatattagttatcttggtccacttttttatttggattcacttttttcattaagtaatgttcgccgatgccaggaatgacaaacgatttgccgactttgcggtagccgtgtttttcataaaaaccaacagcgacaatccgcgcattgcaccaaataatatctgcgccgcgcttccaaattttcgcttcaccgtctgcaagtaaagctgtgccgaggcctttcaagcgcatccggcgttctgtcgccacaccgcgaattcggtactgggcaggattcataataacagtcgatttttctggataaaaactggcaatcccaagtaaaacatctttttcaaaagcgcctaaatgaaaagtaccctccatatcatcattagggtaaattgcgttttcttcaggctgttctgggcgaagaacccggtgcctaatatcttgcgtgtcttttgctttgatttgcttgatttccacggcgcccacctccacgttatttctttctattataaccaatctttctaaaatatctattcaaaagttaattttgtttcataggaataaccacgaaccagctcttgattaatccaagccaccgtttcttgtaaaaggtaattttcattttctagaggagtttcccagttttgcggcgtgacaaaagcttgccgctcgcttgataacaaacgccgttcaccaggcgcgccaatagaatgatctaactcaatgaaaagataagtctgcccgtctaaaatacaataaccaggaaactgctgatagcttttcgaaagaccaaggcggctcacggttttctgcacttcttgatgaaaagccgggtcgtttaaaatatccgcatgaacaggcgttagaagtggctctgtaagcaaaagtcggaccgcggttagaggttttgtcgtgtcagtttcccgttttaacaaaccttgataacggtcaataagccattttttacgggcaatgcgagcttcttcatccattaatttttgttggtattttataagcaaatcgggcaagctttccgatgtgtttttgtcgaggtattgtttcagttcttgcaaggaaaaccccatatactgcaacgcttgaatgaggttgagttgttcttcttgagccgttttgtagtagcgatatccagaagttggatcggtaaaagccgggaccaaaagcccaattttatcataatagcgcagtcgttggatggagagttggcttttctttgccatttccccaatggaaaaaagcggttccacatttatcaccctttcgtcttgactctatagttactatacactttatcataaaggtaattcaaagcgagaggtgaaaaaaatgaaaattattgtggaaaaagattacgaaaatatgagtaaaacaacgatgcaactgcttttagggaaaatgtatcaagacaagttggttcatttagccatcacagcaggctccacaccgaagcgaatgtacgaactgatggtagaagaaatgaaagaaaaggcaccactgacaaatgtaagctattataattttgacgaaattccaattggggacgaaaaatacggcgtaaccattgccaatttaaaagcgatgtactttgatccggcgggaattccagaagaacaaattcacatgctagatacaaaaaactatacagaccatgaagcgcatttgaaagcagttggcggtttggacgcgattttaatcgggattggtgaagatggtcacttctgcgggaacttacctggcgtaaccaaattcggcgatgaaacccgacttgtttccgttcaatcacgcccagatatgttcgatattttgctcggagaagttggcggcgacgtggaaaaagtccccgaatactacgtaacaatgggaccaaaaagcgtcatgcacgcaaaagaagtcatcctattcgcaaacggcaagaaaaaagcagcgattatcaaaaaagccctacaaggcccagtgacagaagacattccaagctcgattttccagttacaccctaattttacagtggtgctggacgaggaagcggcgagtgagttgaatatttaaaagaaaacccaaccttctatttaggaaggctgggtttttgattatccatgcacactagcaaactccgcatcacgcaactcaacgcgacgaattttaccagaatcagttttcggtaatgcctcaacaaactcaatccggcgcggatacttatacggagcggtttgttctttcgtgaatgtttgtaattcatgcacaagatcttccgtgccctcgtaaccatcctttaagacgataaatgcttttacgaccgtaccgcggatttcgtcaggacttgcgacaacagcgacttcttttacggctggatgatgtgtgagcgcgtcctctacttcgaacggtccaatcgtgtaaccagagctaataataatatcgtcattccggccttggaaccagtaataattatcttcatcgcggatagcgcggtcaccagaaacgaaataatcaccgcgaatcgctttttgcaaacgttctggttctttatagtactctttgaaaagtgctgggaaatctctacgcatcgcgatatcaccaatttcaccgacaccaactggatttccttcagcgtcaataattgccatgtattctggcataatcggtttacccatcgaaccagggcgaatcggcgtatcaaccagtgtcccaatcaacagtgtactctccgtttgaccgtagccgtcgcgaactttaatatcaaaattatcttggaaaacttgaattacttcgcggtttagaggttctcctgctgatacggcgctacgaagggaacttaaatcatgttcgcgcaaattatttactttagccattaagcgatattctgttggcgtacagcacagcacgttgattttttcttcttccagtaaatgaagttgtttttcaggaatgaaacgaccgttgtaaatgaagccagtggcaccttttccgagtacagaaaggaaaggagaccaaacccatttttgccaaccaggaccagctgtggcccaaacgatatcgtcttcgtgaatatcgagccaatggtcagcagcgatacgaatatgcgcgtaaccccagccgtgaatatgtacaacgcctttaggattacctgttgttccactcgtgaatgcaagcagacaagcatcatcgcgcgaagtttccacgcgttcaaattcggttgaagcggcttccattaatgtttcgtagtgatcccagccggataatttctccccaacaataatttttttcgaaacagaagggatgctttcaattttatcaaattcagcagtcattccattgtaagaaacgattgcttttacgtttgcatggtggatgcggtattctaaatcgtgcgctttaagtagctcggatgccgggatgataatggcaccagctttccataagcccatgtaaattgcgtacgtttcgagtaatctaggtgtcatgacgataacgtggtcacctttttttatgcctgcgtctttgacaacattggcaaatttattcgcttgttcaagcaggtggcggtaactccaagtttttgtttcgttatgctcatttttccaaattaaagcagttttttcagaactgaatttagcaatctcgtcggtaatattataaagttctggagcgattaaattttctgaattcataatgactctcctttataagtagattgtatattttgataattttgttttaggacctagtattaatatatggtaatataaatgttccgcgaaagcaactaaagtgttcctgtgaaagtttgagcagattattcctacatccaatccaagctatgctaaaataacaatgagtgactttttagaaatgaggtgcatagatggaacgagctttctttatgcaacaagcgcttgaagaagccgagaaagcacgagatattggagaagttccaattggtgcagtcgttgttttagatggagaaattattgggcgggcgcataatttgcgtgaaacgagccaaaatgcagtgacccatgcggagttgcttgcgattcaagatgcgtgtaaacatcaaaattcatggcgacttagcggtgcagaactatacgttacgctagaaccatgtccgatgtgtagcggcgccattttactttcgcggattgaaaaggtttattacggagccaaagatccaaaagcgggaacagccggatcgttaatgaatttactccaggatgaccgatttaatcatacgtgtgaagtagaagcaggattaatggaaaaagaaagcagcgaaatgttaagaagttttttccaagatctacgaaaacggaataaattgaataggtcttaatgcttattgtaagaaatcatacttttaaatctttcattgtgaaataaaaagcaataagccttaccaacatttacagccagataataattgcgaaaaatatcacaatctaactaaaacaaaataacatcgaaagtactaaataaatttgtcgcaaaataggataaaatatactccagatagaactcattataaagtgaaaatctttcttaactagttcctaaatctgtgaaaaataaggattacatattattttattatgctttgtgaattacagagcaactgaacgcgtcactttgggcggtttttcacatgatttttaagagagaagcacaaatcagggaacgaagcagtaatttttagcacaaaaaggaggagaaaagggtggataaactatttttagcccgttttcaattcgcatcaacaacgattttccatttcttatttgtaccactttcaattggacttgtatttatggttgctcttatggaaacgttgtatgtcgtgaaggggaaagaaatttacaaaaaaatgtcgaagttttggggacacatattccttattaacttcgcagtcggtgtcgtaaccggtattattcaagaattccagtttgggatgaactggtcggattactctagatttgttggggacgtattcggagcaccacttgcaatcgaagcgttacttgcattctttatggaatctacgtttatcggactttggatttttggttgggacaaacttggcaaaaaacttcatttagcatgtatttggcttgtttcaatcggaacaattatgtctagtttctggattttagcagcgaactcatttatgcaacatccggttggttttgaatttaagaacggacgcgcagaaatgaatgacttcttgcaacttattactaatggacaactacttgtggagttcccgcacgttatattcggggcatttgccactggggcctttttcattgctggtgtcagtgcgtataagatgctcaaaaaacaagatgtcgccttctttaaacgatcattccaaattgcaatggtcatggcggtaatcggtggctttggtgtggctttcagtggtcactcacaagcacaatacttggttaaaacacaaccaatgaaaatggcagcaacagaggggatatgggaagatacagccgacccagctccgtggacgatgattgccaagatcaacccagaagagaagaaaaacgaatgggaagtcaatgtcccttacgcgctaagtttcttatcttacggaacattaactggtagcgtggaaggtatgaacacgctgcaaaaacaatacgaagaaaaatatggtgaaggtgactacatcccaccagttaaaacagcattttggagcttccgtatcatggttggcgcaggtatgttaatgattttattcgcattaattggtatcgtgcttgcttggaagaaaaaactcgttaatgcaaaatggtatttacgtttcatgattccaatgattggcttcccgttcctagcgaactccatgggttggattatgacagaaatagggcgacaaccatgggtagtcttcggttacatgaaaaccgccgatgccgtatcgccaaacgtttcatcaggacaaattttgttctcgataattgcgttctcgacaatttatacgattttagccattctgttggtttacttgtttatacgtgaaattaaaaaaggaccagacggacacaaaccagaaaaagcagagatttccgtagatccgtttgataagggggatgaaagctttgtcactaaatgagttatggtttctattaatcgccatcttattcattggattcttcttccttgaaggttttgactttggtgttgggatgtctacacgatttatggctagaaatgcacttgaacgccgcgtgctcgttaatacgattggaccgttctgggatgcaaatgaagtttggttactaactgctgggggcgcgattttcgccgctttccctaactggtatgcaaccatgtttagtggttattatattccgctagtattcttattacttgcgctaattggccgtggtgtttcttttgaattc

SEQ ID NO: 3878 - DNA, 8604 bp, Listeria monocytogenes 4b
  misc_feature (1)..(end): n can be any nucleotide: a,g,c or t/u
tctgttttttatgttaagagggaagggaggagggcgaaagaaagggaggaggaagggaagaggggggaaggggaggagagggagagaggggaaggggagggagaggaggggacgggggagggaggggaaaagagagggagagagggagggagggggacggggggaagggaaaggaagggaggggaggggggagggggggggggggggagggagggggggggggaggggcaggggggcgaaaaacggaggggggcgaggaggggggggcggaccacggggacgggggggcgggagacgggagacggaagaaaggagaacagaaagaaaagagcaaaaaaaaaaaaaaaagaggaagaggaacaaaaccagacaaaggacgagcaaccgagagggcgtagccagtggcaaagagaggcgggaggcagacgagagaaaggacagggaacaggtcggaagaggaatgtctgatcacccagatggagaagcacgcctaatcccgcaacaatcattactacgacgaccaatgctataaaccacctctttttcacgagatcacctgtgcagtatgtcttcttctatgtaatcccaatctaccttaattaaaaacaagaaaaaaccacattattcagcggaaactttcaacttaaacggtaagtttgaagttttcgtgaacatgtggtttcagtaattatagtaatccgtgttcttatttacttattttagctatctttccttgctcaatataaactagcaaaatagatatatcggctgggtttactccgctgatacggctcgcttgggcgatggaaaggggttcgattttctttaatttttctagggcttctgttgctaggccgctgattgcatcataatcgatattttctgggattttcttgtcttccatgcgcttcattttttctacttgaaggttggatttttgaatgtagccttcgtatttaatttgaatttctacttgttcagcgatttcgtcggtcacaaatgtttcacgtgaaacaatttgggcgattttgtcgtaagttatttcgggacggcggagtaaatctgctgctaaaattccgtcttttagctctccagaaccgatttcttttagcattgcttggacttcagcagttggtttaatgcgtgttttttgtagtctttctttttctgcttcgatggcactttgttttgctaaaaagcgttcataacgttcgtcgctaattaagccgatttcatgaccgatttctgttaaacgtaaatctgcattatcatggcgtaatagcaaacggtattcggcacgagatgtaagtaaacgatatggttcttcagttccttttgttactaaatcgtcaattaaaacgccgatataagcttggtcacgaccaaggataactggttctttttcaaagactttacgtgcggcattgattcctgccattaatccttgtcctgctgcttcttcgtaaccacttgtaccattaatttggccggctgtgaaaagaccttcgactaatttagtttcaagcgatggccacagttggtctggcattactgcatcatattcgatagcgtagcctacacgcatcatttctacattttcaagtcccggaatagttcttagcatttcgcgttgcacttcttctggcaaactggtggaaaggccttggacatatacttcctcggtatttttgccttctggttcaaggaagatttggtgtcttggtttgtcgctgaaacgaacaattttatcttcaatggatgggcaatatcttgcgccagtgccttttttcgttgctgtaaacattggtgaacggtgtaagttcgcttggattatttcgtgggttgtttcgttggtataagttaaccaacacggtagttggtcaagcaacatttccaccgtatcaaagctaaatgctcgcggatggtcgtcacccggttgttcttctgtttttgagtagtcaatcgtacttgattttacacgcgggggtgttcctgttttaaagcgacgtagttcaaaacctagttcttccagatgctctgaaagtttcacagaaggttgttggttgtttggaccgctggaatagcgcagttcgccgacaataatttcgccacgtgagaaagttccggtagtaataacaactgttttcgcgtagtaaattgcgccactgtttgtaataacgcctttacacacgccatcttcaatcactaaacggtcaacaagtccttggcgcaaagtgatattttcttctttttcaattgtgtgtttcatttcgtgttgataatcccatttgtctgcttgagcacgtaatgcgcgaacagcgggacctttacctgtatttagcatccgcatttggatgtacgttttatccgtgttgcgacccatttcgccaccaagagcatcaatttcgcgcacaaccacgccttttgctggccctccaacagaaggattacatggcataaaagcgaccatatctaaatttatcgttaacatcagtgtttttgcgcccattcgaccactggcaagaccagcttctactcccgcatggcctgcaccaacaacgatgacgtcaaaagttcctgcatcataggtttgcattttataaaaacatctcctaaaaaatcattttccaaggcaaaattgattgaacaactgatcgagtaattcatcctggacagaatcaccagtaatttcacctagtaaatcccatgcacgagtcatatcaatctggacaatatccactggcataccgagctgaatccctgttgtaacgccatttaaagcttcaagtgcttggtgaaggagcgcaatgtgtcgaacgttcgatacatatgttgcatcacccgcatcaatgtcaccagcaaaaaatagtgttttaattgcttcttctaaagcctctaaaccttcatcgtttactagagaagtggaaacaatcgggttttctcccgcaagttcacgcactctatttatatcaagctttgtttccaaatctgttttatttaaaacgaccacataattatgacccgcggctgcttcaaataacgcttcatcttccactgtcagctcttcgttttgatttaatactagcaggataaaatcggcatccgccaaggcttttcttgaacgttctacaccaattttttccacaatatcttctgtctcacgaattccagctgtatcgattaaacgcagcggaacaccacgaacattgacgtattcttctataatatctcgcgtcgtcccagcaatatctgtgacaatcgctttttcttcttgaattaattggttaagcaaagatgatttcccaacatttggtcgaccgataatagccgttgctaggccttcacgaagaattttcccttggcttgctgtttgtaaaagttgctcgacggaagcgcgaactagctcggttttctcgagtagcattcgctgggtcatttcctccacatcatcgtactccggatagtcgatatttacttcgacttgcgctagtgcatccaaaatttcttgacgtaaattgcgaatcaaccgtgaaagatttccgtccatttgccgaattgccacgcccatcgcccggtctgtcttggcgcgaattaaatccatcacagcctccgcttgcgacaaatcaattcttccatttaaaaatgcgcgctttgtgaattcacctggttcagctaaattagccccatttcgaagtaacagttgcaacacgcggttcacggaaacaattccgccgtgcgcgttgatttctaccacatcttcccgtgtaaaagtacgaggtgcacgcataactgtgaccattacttcctcaattacttcgccgtcttcttttatatgaccatagtgaatggtgtgactttctgcttcacttaagctatttttggcataaaaaatacgatccgctatctgaatcgcctctggaccgcttaatctaataatagcaatggccccttctcccggcggtgttgagattgcagcaatagtatcaaattccattctttactcatcctttctcattagaatttcagctcaaataagccttatcctattttgaataaatcttggcacatgatttcgtgcattttaaacaacttacgctccgctttgaccaaagcaattaaattgttagtattttgaaggttatgcatagacttattaacatatccacagaaaaaccattaataaaaattcatccataccattttaacttatccacatgtgaataacaatagttttatccttactagttaagaaaacttaaattttctcgttaaagctttaacttatccttccacttccttggctttaactcaattctttttatctatactaaagttaaaaggaggagaaaaaatgaaaatacataaactaacttgggtgctattaatggggctactactgctctcatcctgttccacgaagcaaccaaacctatatttgtcagcaaatgccgccgcggtttattcagtcgaaaatggtgaaccgttatatgaagaaaacgctgataaagtaatgccgattgccagtttgaccaaattaatgacagcttttttagttttagaggctgtggataacaatgaattatcgtgggatgaaaagcttgatcttgttcgattggatgatccttccgcggtttccctttacgcgattacacaaaagagaacgtggtccgtcagagatttatacagcgcgatgctcactatgtctgcaaatgatgccgcggaaacactgggagatcgtttagacggagctaattttcccaaagaaatgaataaccaggctaaaaaattaggtatgtcgagtaagactacatttgtcagtgctagcggacttgatgttgacggaaaatccgctgtttctaccacaaaggatttatttttgctatcatctaaattaatttccactcatcctgaagtgttagagacaacatccaaatctagtgtcaccactgacaaaggcgccaaacttgaatccaccaatgactcactcggttcgattcaaggcttagatggactaaaaactggatttacagatgaagcaggctattgctttattggaacagctgaacgtggaggaaaacgtgtgatttcgattgtcctagatgcgggaactgcggaaaaacgatttaaagatacagagaagctgatggaggttggatttaaagaaaattaacgaatgaaaagaacctctctttcgctgagaagttcttttttaaatagttcagcatcaactctttaaagcgcatagatacttttccatgtatacatctttatttttagaattatattgcataataaagcgtggatgttccaaaggtatgattgtatcaaaaaaatgatgctcctcatttattttcgataaaaaattaaaattctcgccgctgccaatgcagtaacagaccgaagtatctatcccgcaatctatttggttttgaagtgattctaaaataattggcttcagcgcctcttgtagtttcttattctcataatagttgcaattaacctcattgccttttgcattcatacgaacaataccaagcgggcagacaaaattcatataaaaatcagtataaaatgcctcacaaccgccgtattctgtcataacatcatataaaaaatctgaggaagactggtttatataaaatttatcaataaaaataccggtttcgttttgaaggtgttttgcgtcttcaaaaggaacgcctgtcacagcagaacctctccgcgcgggagaacttccaagtattatccggcgcagtttagtatcattatagtatttctgataaaatgtggtcgttattttttgcactagttcgctttgatcaccagaatatgggttaacggtgcgatacccctccggcaaatcaaacgaactattcgcaagcgcctcattaaactgcaatattcgtttagcaatagttgtattttcagtcatgtaaattagccctctctttatttttatttcacaatctgccaaacatcctcaaataactccgcataacccgcttgttcccacctgcttgcaaaataaggattatgaaaataagtgaacgccgtaataatcgcgtttccttggttcgttcgaccgctcacttcttcggctttttgtgctaaatgggctacgtggtttttcactaattcttcattttgttcaatataatccgtataaagtaaaaacatttttcggtcggttttgtatcgttttttcttagtatcggccaagagccaaagccagtcgtgaagcgcatcatctggtgtttgccctgcgtcctgtgtccaatcgaaaatctcccgcgaagtttcctctaaccaacgtagcgccaatttttgaaataaatcctctttatttcgataatgcttataaagtgccgcatgtgtgacgttcaaattacccgcaatatcatacagcgtcgttttttccatgcctttttcgtaaatgattttctctgccatatttaaaataatttcttgtgatagtctcgccattttaacccctcgattcaactcattctttgctttttattatacaggaaaacagaaaagttacaaatccttgacaaagtaactaaaaggagtatacttccaactataaagttactaaaattaaaaaaagtaaccattttgaatttaaaggagcgaatagattatgacaaataaacgtgttgcatttattttagggggttctggcggtattggtaaggcagtcgtccaaaaattggtcgaacaaaattttgcagttgtggttcattattcgggtaataaggctaaagccgaggcgcttgttgaaaacattgtgaagtctggtggagaagcgattagtgttggcggcgatgttgctgacgaggcgcagatgattcgtgcatttgatttcattgaaagccagtttggtggaattgatgttgtcgttaacacggcaggtattatgaaattaagtccgattgctactttggatatggatgaatttgacctgattcagcgaaccaatgtccggggcacttttgtcgtttccaagcaagctgccctcagagttcgagatggcggcgcgattatcaatttctccacttcggtaacgcgaaccagttttccgacttacggggcctacgttgctagtaaggccggggttgagtcgctcacattaattctggcgcgcgagcttcgtgggaaagatataaccgttaatgcagtagcacctggcccgaccgccactccgttatttttgactggaaaagacgataaaacaattgacaacttagcaaaagccacacctttagaacgcctaggacaacctgaagatatcgcagaaaccgtagcatttttagccggacctgcacgctgggtgaatggtcaagtcattttcaccaatggcggattagcttaattaaaaaaggaggaaaacagagctatctggttttcctccttttattttattggtcttttttaatcgctaaaacaatcaatcccgatgctaataaagttaacgccaagaacagaaaagccgattgataagagttagtcgcgtttaccaaatcccctataatcatcggtgcaaaaaagccacctaaaactccgcccgagtttatagccgcgtattttgttgcaatgtggctctgctgaaacaacttgtgcggcaatcccattagcgttgtaaaggccatgattaggaatatattacataaacacaagcaaataaccgatagcgctaattgttcaaataaatacaccccgtataccgcgaacgctccaagcacacaaaatgcgaaaataataatcggctcttttcctttgaaaaaacgactaatgaaatagccaccgacaactcctgcaattaaaatacaaaggccagctaaagagctaatatagctcacttcgctaatagaaatccctctaacctcattcaaataagaagcaagccaacttgttaaaccgtagttcgctgcatttataaaaagcgctgatagcaaaagaatccaaagctgtttatctttcaaaagttctgagaaaggtactttgattttttctttttgagcatttaggtctattttcggcgctttaggtacgacaattaaaatcagaaagccaatcaaaatcaccgcaataccaatccagtaatatgtattgcgccaacccactgatagcaacagttgcgcgattaacaatggcccaataaatgccgcaaaaccagaggaagcgagcattgcggactgagcaaaacctcgcttgttcaacggaatatgaagtgaaatataattgctgacagacgggggataacccgcgtgtccaagtgctccggataagaaacgaataacaaccaaaaacaacaaggaatagccaaagccaaaaataacaagaaatagcccgacaataataattgataccgcaagaactggtcgtgcgccaatccgattgtttaaataccccattggaatttgaaaaagtgtgtaaccaagaaagaaggcacttaaaatcaaccccttttgacttggatcaaatcctaaatcctgagaaacagtcacaagcgaaattccaatagtatatttatccacgtatacactagtgtagcctataaatagaacaagtaacaccattaacgaatgcttttctcctttt

SEQ ID NO: 3879 - DNA, 8290 bp, Listeria monocytogenes 4b
  misc_feature (1)..(end): n can be any nucleotide: a,g,c or t/u
gttggcttaagagcaatacaaagttcaaagcgattgctaaaacatcgaataactggtatcgatttagttttaaaggaaaaaatggctacgtatctgggaaatacgtcaaggccgcaactgccgcgccggcaccaaaaccttcaacgccaaaaattgtgcaaatgaatgtgcctttaatcgttcagcgtccacaattgccaactggctgcgagattacaaacattgcgatgatgttgcgctacgctgggaaaaatgtcgataaagtcaaacttgccaaagaaatgaaacgtcataaatccaatccgaattatggttttgttggaaatccattctctaagagtggctggacgatttatccaccggctttagttaatcaagttaaaaaatatactgggagcgcgaagaatatgactggaacaaatttagctggtattaaaaatcagttgaataaaaaacgtccagttgtagcttgggttagtaatttccatggtttttccgttcatgcgattactattacaggttatgataaaaataatttttactataacgacagctggtccggtcaaaaaaatgcacgaatttcgcaaagttattttaatacttgttggagcaaacaagcaaaacgctcgatttcatattaaaataaaatccccactttcgatgatgaaagtggggatttctgatatattagtcgatatctttaccatttgtttcaattacttttttgtaccagtcgaatgattttttcttcgagcggtttagggttccgttacctttattatcgcggtcaacgtagatgaagccgtagcgttttttcatttcgccagagccagcgctgacaaggtcgatgcagccccatggtgtataaccaagaagttccacgccatcctcaattgcttcgcccatttcgcgaacgtgttcacgcatgtagtcgattctgtaatcatcagtgattgagccgtcttctgccacagtatccactgcacctaagccattttcaacgatgaaaagaggtttttgataacggtcgtaaattgtattcatagtaatacgtagacctagtggatcaatttgccaaccccattcgcttgcttttaggtatgggttttttagtgttgcgaaaacgttgccttctgtttctttgtttttctctggatctgcgcttgttagacgagaagaatagtagctgaatgccacgtaatcaactgtgtgatcgcgtaatgcgtctaagtcgccatcttccattttgatgttgatgttgtgttctttgaagaaacgcttagtgtagcttgggtagtatccgcgtgcttgaacatcaatgaagaagtagccttcacggtccgcctcgatagacttccagacatcttttggattacaagtcattggatatgtgttacccgctgcaagcatacaaccgatttgattttcaggattgatttcatgaccaagtttagttgcaagtgctgatgcaactaattgatgatgagcagcttgatatttaacttcctctggattgtcctctttagtaacgtctaaacctccaccaatgtatggaagatgaagaatcatgttaatttcattaaatgtcatccaatattttactttatctttataacgcgtgaaaattgcttcacagaaattcaagtaaaagtcgatgcatttacgatttttccaaccaccatattttttgaaaacttctagcggagtatcaaaatggttgattgtaacaactggttcaataccatatttgtgacattcatcaaaaactgcatcataaaatgctaaacctttttcatttggtgtcgtttcatcaccattcgggaaaatacgtggccaactgatggacatacggaaacatttgaatcccatttctgccattaatttaatgtcttctttataacgatgataaaaatcaattgattcgtgacttgggtaaaaaccataatctgtagcaagcgctttcgctggattgaataaagcttcccaacgtccgtcctctactgttggaaggatatcaacaagtgaaagtcctttaccgtcttcaagataagctccttcacattggttggcagcaactgctccgccccataaaaagtctttaggaaattttgattctgtcatttttgtatatctcctctcacgaatataatttacttttccactatagaatatgtaatgcattacatagcaagcaataatttcaaattttttaaattcgttttccattttatgattttaaagttcacaatttagccattaaaatccaaaaaaaagcctatttttgataaaaacccttttctccatactgatagaattagataactttttaatttaggaggagaaaaaatgaaatcaagaaaaaaagggattatcttggtactgtctattattataattttttccatcggtttattagtgaacaacatcatgacaaataacaaagataccgctaagccaaaaaagaaaaccgtcgctgctgttaaaaagaaaaaagaaacacctccaaaaccaaaagaaccatttaacattgattttacaggtgatattatgtttgattgggatttacgccccgttttagcagagaagggaatggattatccttttaataatgttcgcgaggaattgaaatcaagcgactatacatttgttgatttagaaacagctattacaactcgaacaaaaaaagtcccctaccaagaattttggattaaaagtgatcctagttctttaacagctcttaaaaatgcaggggttgatatggttaatattagtaataaccacattttagactattacgaagatggattactcgacacaacggctgctttacgcgccaataacctagcctatgttggcgccggtaaaaatgaagatgaagcctatcaacttaaagttgctgacatcaaaggtaataaagttggattcatgtcgttttgccactttttcccaaatactggttggattgccgatgaagatactcctggggttactaatggttatgatataaatttagtcgaagaaaaaatcaaagaagaacgcgcaaaaaataaagatattgattatatggtcgtctattttcactggggagttgaaaagacgaatacacctgtagattatcaaacccaatacgttaaaaaactcgtggatgatcatttagttgacgcgattgttgctagccatccacactggctccaaagttttgaagtatacaaagatgttccaattgcttattcattaggtaatttcttgtttcctgactatgtttctggtcattcagcagaaacaggtatttataaactgaattttaatcaaggtaaagtgactgcgcattttgatcctggtattatttcaggtaatcaaattaatatgcttgacggttctgccaagacagcacaattaaattatctccaatccatttctccaaatgcaactattaatagtaatggtgatatatccgcaaaataaaaaaagctgatgctagttcggttttaaccgttctaagcatcagcttttttttataacaaatgattcatatggccaatttccattacccaataagaaccaataactacgacaatcgcgataaatgcggcgaataaaatattaccgatttgaattttaccatcgcggccttctgtcatatgcatgaacatcagaagctgtagggctgcctgaatgaacgcaaagatgaaaataataactaccttaacatttgttgttagcgtcgaataaagagccacccagactgctagaagcgtcaaaataactgataacgcaaagccaacaatatgtttccaaggaatgccaccttcagcatgagctgcatttgatttattattttgtgtcatattagttcaccatccctagcaaatagacaccggtgaaaatgaaaatccacacaacatccaagaaatgccagtataaactggaaataaatacttttgatgctgtttttggcgtcaaaccatgcattttaatttgaatcagaataaaactaatccagaaaatcccgaccgttacgtgaagtccatgtgttcctagtagaacgaagaatgccgaccagtaagaaccgatttgcattgtaacgccttctgtcacatagtgtgcaaattcataaagctcaaagccaacaaatcccgcaccaagaattaatgtgataatcgagtaaatcgtcaacattttcacattgcctttacgcatctcaccaattgctaaaccacacgtaaaactacttgttaaaagtaaaaatgtcattattagcactagccaaagttcgaacatttctgctggcggatgacccgcattcgagccagcctttctcataacaaagtaagtcgcaaaaagcgttgcaaacaatgcaatttcggcgccaaggaaaatccagaatccaagaatatttaatcgaccttgttctgatctatattcaattggcagatttttatttgtttctacagattccatgggttaccctccttcacaccagtcgcaagttcgcgcgcattatgttcttctgttgctttaatttcgtccacttcaacgtggtaaccatcgttattttggaatgaacgataaatcatacatcctaaaataccaactaggccaataattcccatccagtaccagtagaagactagtccgaaacctgcaatgaagaagaagacagacattacaaacccaaccatggtattacttggcatatggattggtttataatttttatcatttacatatggatcgcctttttgttttctattccagaaatcatccaagtcattccattcaggtaaaacagcaaagttatattttggaggaacagcggaacttgtagcccattcaagcgtacgagcatcccacgggtcaccagtaacttcacgtttagagtttttgtagctgtagtagatgttgtagcaaagaactaagaatgctacacccatcaagaatccgcccacagtagagataaagttaagcgttgtccagccatcaccttgtacgtaagtgtaaatacgacgcggcataccatctagtcctaggaaatattgcgggaagaaacaaacgttaaatccaacaacgaaaatccagaagaaccatttaccaattttttcatttagtctgtaaccgaccatttttggataccagtatgtaagcccggcaaagcaggagaacacagttccagcaattaatacgtagtggaaatgggatactaagaagtacgtattgtgatattgataatcggctgcagccatcgcaagcataaccccagttaccccaccaacaacaaagttagggataaaggcaagcgaccaaagcattggcgttgtaaaggttattcgccctttgtacatcgtaaagagccagttgaatatcttaatcccggtcggtatcgcaatcatcatcgttgtaatggagaagaaggagttaacaagcgcccctgatcccattgtaaagaagtgatggacccaaactaggaaacttagtaaagaaataactgccatcgcggcaaccatcgccggataaccgaataattttttcctcgagaaagtagaaataatctctgagaaaataccgaaagctggcaaaataacaatatatacttccggatgaccccaaacccagaacaagttggcccacatcattgggagcccgccattcgtgagtgtgaagaatgctgtcccaaacagtcggtcaaatgacatcaaagcaagtgccactgttaaaactgggaaagcgaaaataatgatcaaacttgtaattaatgaagaccaagtaaacattggcattttcattaacgtcataccttttgtacgcattcttaaaatcgtgacgaaaaagttaatccccgtcatcagcgtaccaataccagcgatttgaacacctagaagatagaagttaattccatatccagcgctaaaatctgtcgcaagtggcgcatagtttgtccaaccagcatctggcgaaccaccaattacgaatgataagttaaatagcatcgctcccataaagaacgtccaaaaacttaagttgtttaaaaatggaaatgctacatcacgcgcaccaatttgaagtggtacggcaatgttcatcaatccgatgataaacggcatcgccataaataaaatcataatcgttccatgtgtagaaaaaacttcattgtaatgctgtgcgtctaaaaatttcatatccggtaaagcgagctgggtacgcatcattagcgcatccacaccaccacggaaaaacattaagacagcagcaagcaagtacataataccaatttttttatgatcaacggaagaaatccactctttcatgagccacttccatttttttgtataagttagtaacgcaacaacaccaatacttacaagtacgatagaaatctgcgcgcctaaaatcattgggtcgccagttacgataaactcattccatttcatgccttatgtcccccctttttacttccctgcgtcatccgattcttttttattgaattcatttgtttggatgtcttcttccattttcttcatttcatcttcgcggtgtttatcctcgtggtaaccttcgccgtttttaataatttgtggcttcatatcatgacgctcaaattgcggattagttactgtcacaggacgaaccggaagcattggttcatcagaaatggttgattttgtgtttggattatgcggatttgtcatctcataaccaaaacgtttgtaggcatagaaaacatactctggatcagctgctacatcaacaaatgctaaatgcgtaccagaataagtctttttcttagagcttccaggaattaaaagacgatcatatatgtcttgtgtaataactggcgagcttgcttttgtttctttcgcccattttttgaaatctttttcagattgagctactacatcaaagcgttgatccgcaaaaccttcgccgttgaagtttgcgttacggcctttatatgtaccaacttcatctgcttgtaaatataaattcatcgtcatgccagacatcgcatatttttgtccacctaattgcggaacccaaaagcttgtcatcgtatctgcagaagttaatttgaatagtacaggacggtcggttggaatatttacatagttgactgtttcaattgactcatctggataactaaaaatccatttccagtctgcacttgttgcgtaaataacaattggatctttatgcgaagtcacttttggtgcttcttcccctgcataaattgtttttacagtcggaatagctagagcaataacgattgcaactggaatcaatgtccaaaaaatttccagttttttactaccgtgcatatccggctcatagtttgaaatgtctttccgttcgcggtatttaaccaacataatcgtaaacaatacaaaaatcgtcaaaacaataaccagcataaatataatcgaataaataattaagtccgactgaccttttgcaactggcccttttggattaagtaccgtcaagtcaccacaaccacttataaggccggtaaccccaagtagtgccgtaagcagcaaagatttaagtacctttgacacccgaatcccctcttttccttttgatgttttctaatgtgtatttttgcgcaaaaataccattaccggagtgctgaaagaagcttgttagaactcctatgtaactgaaaaaatgcttttactatttagttcttttaaaaaaactcacaaacttttttaaaaattaatcagcatttttagaatcactatgttcatactctaactcattatatctgatttgatatcttagttcaaaaacctgatatattaaatatttcacaaacttttattctgttcactattccctagtttgtgaaatttaaaacaaaaaagcaaatgatattcaagaatatcaaaattctaaccttttatattattttttaaatttaaaaaataatattgtattacattaatatttcatgctatattaattttgtaatataatacatataaatgaaagagggaacaaaatcatgttaaagagaaatgtacaaaaagggatgattagtttaattgcaattatgatgtttttatcaatgttcagttttacaaatttaaattctattaaaactgtagaggctgcaacaactgcgtacaatacaattgagtacaataaatcagttaatttagatgctaatattgcatatccagaaacaaatgcattttggtctgcaccatattattcagaaggatcaacatttatatcaagtgcaactgcaccttcttatgcaaaaaaagatgttaaattaataagagaggca

SEQ ID NO: 3880 - DNA, 6679 bp, Listeria monocytogenes 4b
  misc_feature (1)..(end): n can be any nucleotide: a,g,c or t/u
tggcattagatagattgaaaatgtaagttggaggcgagtatatggaaacgaatcgtccaagtccggatgcgctactggtgaatttgcaagaagaaacagattcatccgtgggtaaattaaaaatatattttggctttgcggcaggtgttgggaaaacatatgccatgttaagtgacgccaaagatcaattagcagcaggtgtggatgtcgtggcgggttatattgaacctcatgctcgcgaggaaacgctgagaatgttagaaggaatcccgattattccaccaaaagcaattactcacaaaaatattgcgctcaaagaattcgatttggacgaagcgttgaaacggaagccggaacttattttggtagacgaactcgcacatacgaacgcatcaggtgtacgcaataagaaacgtttccaagatgtggaagaattgcttcaagcgggaattgatgtgtatacgactgtcaatgtgcaacatattgaaagtttaaacgatattgtagaaggcatcaccaaagtagctgttcgcgaaacgattcctgactatgtttttgatgaggcggaccgagttaaattaattgatattgaacccgatgaacttctaaaacggttagaacagggtaaaatttatcaaccggcgcgcgcaaaaacagctatgcagaacttcttcactagagaaaacttaaaactcttgcgtgaaattgcgatgcgaaaagcggccgaccgaattagtcacgaatacgatcaaacaggtgtttatccagagaaacgggcgagtagtaaatggttagtctgtattggaacgtcgccttcatctgcaaaactcattcgctggacagcgcgcactgccgaggctttccgcgcaccatggacggccctttatattgaaaatgaagaaaatgattatatgaccaaagcagagaaaaaatgtttacgggaaacgatggaactcgctgaacggcttggcgctgaaattgtcaccctcgccggacatgacattgcagaaacagtagctgagtatgcccggttgactggtgtgacaaatatcgttgtcgggaaatcgcgtcgccgcatgggtttaaggtctttatttgaagatgattttgaggatcgtctcattacgcaccttgataacgttgatatgcatattatcccctcgagccaaccaaaaacgaaaaagcgtcgaatgaaaatgcgttttaaaagttttttaacctggcatgacatggcgaaaatgattttacttctaacattggcaacggcgatttgtgtcggtttaagtgaatttggcatcggtgatcaaaatgttattatggtatatattttatccgtgttaattatttctcgtgtaacaagcggctatgtttatggcgttatgggttctatcattggtgttatgttatttaatttcttcttcacgacaccactttatacgtttaatacaattcaagcgggctatccggtgacgttcggaattatgcttttagtcgctcttattacgagtgcgctaactgtccgaattaaaacccaagctagcctggccgttgagcgagaacgccgaaccgaagtgctttatgaaattaataaacggctattagtcacccgtaatttaaaaggaattatcgatttaaccaacgaatatattttgcatttatttagccgttccgttattttttattctgcggatcctgccaaaagtaataaagggattttcgtgcaagcagaaggaaaagaagatgcgagtgcgcttcttagtgcggatgaagaagcggttgcccactgggtatttaaaaataaaaagcgggcgggtgctgggacggatacgttaatgggggcatttggttattatatgccagtgatgtcacaggggaaagtgcttggtgttattggtgtttcttgctccccagaagatggtccacttacacaagataatcggatctttttacgaatgattagctctcaagtggcactagctttagaacggcaatatttatctgaagaacaacgccaaatcgtcatcgaatcagcaaaagaaaaaatgagaagcaatttacttcgggcaatttcgcatgatttaagaacaccgctcactggtattgttggagcaagttctgccttacttgaaaaagaaactgagctagataaagaaacggaacataatttaattaaaggtattaaagatgactctggctggctcattcggatggttgagaatttgctttctgtgacgagaattagtgaagggttagtgagtttggaacgagctccagaagccgtagaagaaattgtaggtgaggctgtcggtcgaatcaaaaaacgtttcgcggaccgaacaatccatgtcaaagtaccgcgcgaccttcttatggttccgatggatggcacgttaattgagcaagtccttattaatttaatggaaaatgcgctacgtcatggtggaactggtgcagaagtttgggtagacgtgacgaaaacgaagcaaagtgcgatttttagtgttcgtgataatggaaaagggattccggaaaaacgcttgccagatttatttgatacttttgctgtggaagcgagagagcgttctgatatgtcacgcggattaggacttggtttatcgatttgtatgtcgattattcgagcgcatgacgggactttagaagcgaaaaataacaaacatggcggggcgacattctggttcactttgccactagacggaggagatggaaaatgaacagcaaacgacttgtgctaattgtggaagatgaagagggtatcagtaattttatttcagctgttttgactgcgagtgattactcggtgattaaagcagtgaatggaaaagaagcgctagagcagacagcaagccattcgccagatgttgtgctactcgacctaggtttgcccgatgtagaaggactagacgtgctccgtgatattcgtgtttggtcaaaagtgccgattattgttgtatccgcgcgcgatcacgaacgagagaaagtgacggcacttgaccttggtgcagatgattatattacgaaaccattcggcacatcggaactactggcgcggattcgaactgccctaagacacattcaaccaagcagcaaagaagcgccaaatgatcatattattcgcattcaagacctgtatattgatgacgaccgccgacttgtcaaaatgggagataaggaaattcattttacgccaattgaatataaaattttgcttctattagctcgccacgccggaaaagtccttacgcatgattttattattcgcgaaatttggggaccttatccaagtgaaaaccaagcacttcgggtcaatatgagtaatatccgacgtaaaattgaacaaaatccggcagaacctgcatacattttgacagaagttggggttggataccggatggcagaagaataataatatgttatgataaaaataaacgccaggaggaattaatatgcataaaacaatccgtagcgtagacgtttattatgaaaaatatggtgaaggaataccgataataatgattcatggttttggtcctgattcgcagctgatgattggttgcatggagccggtctttgataaggaaagtccattttcacgcatttatgtggatttgcctggaatgggaaaaaccgagaattacgattcaatccaaaatgctgaccatgtactcacccttttactagaatttattgaagcggtaattccgggagagcaattcgtactcgccggagaatcgtatggtggttatttagcccgcggaatcgcagcgaaaatgccagatagagtacttggagtcttacttatttgcccagtcatctatcctgaaaaagaaagaagaacgctacccgaacaaaaagtcatgtaccaagatgatacgtttgtacggtcgctatcaaaagaagaccgagcgtacttttcaaaaagtggcgttattttaacagcaagaaactggaatcgtttcttggcggaagtgatggcgggaatgattaatgcagatggagaatttttagaccgattatctgcgaactatgcgctgagctttgatccagacgaaaaagcgcaattcgatgtgccggcattattcttatttgggcgtcaagatgatcatgtgggatacgcagacgggcttacattgcttgaaaaatatctacatgcgtcgattgctatccttgattttgcaggacataatttacaaattgaacaaccaaaaatatttacaacaatggtagaggatttcttgttccgcgtgaaaccagaataagttaacctttgtgaccaccaaccatttcagaccgttttaagccagtcgctccatttaataaactgcttgcatgcataagtgatttaaaaccataacgcgaccggattttgtcgacagttatttctaactgctcatgatttaaagttcgagtagcatcctcaaataaattgagctgcaaccctgttttcaaagtaatcttaccgcatgaaatagcaatggagcgcacaggttcgcgttcatcgtaacgtctaaatagttgcaggaaataaggaataagcgcatgactactactagtaggagggattttagcttgatggctgaatcctttttttatgctgtatttactgtagccgatacttagatgaataacagcagtatccacatgattttggcgtaaacgcattgctacttcctcaaccatttcgcggatgacaatctctacttcggccggcacatgatagtctttttcaagaatttggctttttccgtagcttttactaactggaacatatttttcatttaaaagactataatcgatgccgtgagcatgataataaagttgctctccgactacacccattgcgttttttaacacttgtggtggcgtttggcttagttgatacatattgaaaatccccattttttgcaggcgaacagcagtccgacgcccaattccgcacacatcatccaaatgtctgattttccaaatggtctcgggaacgtcttcatagcgccattcagcaatgccgtcatcccggtttttagccacattatcgagcgcgagtttggcaagaagagggttgtcgccgattccaactgtaacgtatagccgcaattcttctaaaatatcacactggattttgcgaacaatttcttccgtgctaccgaataacaaatgcgatccggtgatatctaaaaaacattcatcaatactataaacatgaataaactcagcgggaacataacgtctaaaaatggcttgaatcatcgcatttacttttagataaagtttcattcgtgggggtgcgataataattcgtttatcccaggtgggcagttcatacattcttgagccggttttgatgtgatgttcttgtttcatttttggagtggcagctaaaacgagcccgccagctcggtcggcgttactcattactactaaatatgcttcaagtggattcagccgacgtttgacacattcaactgaggcgaaaaaacgatttaatatcgatgcacaaaatatcacggcgcggtgcacggctataatcttctatttgtaccatttttcgacactcctttcttctacattgcgaattgcagagaaggaaagcgggacagtcccctcagagtttttaatgtaaatggtgttgttctccacgcctgaaatacgaccaataatatcattttcaggagcagattctgggtttaatggctttttctggataacaagcgtagactgatgtgtcatcgcgctagctagcacgctttcgataaattctgtagtcatagcttctttccatactaaagttggttcagcgtcttgcattgcttctgtatgctcgcttaataaaaaaccgccccatttcttcatgccgcgatcttggtagctcatatgatgacacctccaatattttcaaataattagctgttgcttaaatatattatacgaacaaacgttcttgtttacaatgtgtaaatatcctcatttatgctagcaaaacgggaataaattactatttgtgaactattaataaagtggacataaaaaaagaccaagcctgtaaaattagacttggtcgttattatttttttaagcctggctatcttcgtaagcggtgatttgtcctacacgatttgcgtgtcggccaccttcatacgctgtttctagccaaattttgacaatgtcttctgctagccctgggcctatgactctcgctccaagcgcaaggacatttgtatcattatgttcgcgcgtggcatgagcgctaaatgtatcgccaacaagcgcgcaacgaatgccttttactttattagctgcaatactcataccaatacccgtaccacaaactaaaatgccgcggtcaacttcttggttaacaactttttcactaacggtaatcgctagtcccggataatccactgattctggtgcttcggggccaaattcttcataactaattccaacactttcaagataagaaataatactttttcgtaattcaattccgccatggtctgaagcaatggcaactttactaactgtcattttttctcctcctgccgtataatcaataccttcattatacatgaattagagtttttcgacagtctttctgttgcgccaaggttttgcgtgaacaataataacgtcgcaaggtgcatgagcggccgtatattcagac

SEQ ID NO: 3881 - DNA, 8253 bp, Listeria monocytogenes 4b
  misc_feature (1)..(end): n can be any nucleotide: a,g,c or t/u
ccgtatgggcaacctagcatgcatgcttgagcggccgacactgtgctggaaacaagaggaaaatgctccttttggggcagaattcacagaaaacttgtcaaaatttgatggcactttatcagcagaagatattcgaatgcaaacggccgctttagaacaagccaatgcgaaaatgacttcagaatttcaaattttagaagatagtaattcattgttatcacaaacacaggccttacagagctatatagctgaaaccaatgcacggattgatgcggtggatgccgagattatgggaacgctcgaaaatgattttcggacggctgtttataatgacttgttgcgtattttacgagaaaacgagtactcggataagttgaatgaaattggccttaaagatttgaccggagaagatattaatgctggctttaacaaaatgattgttaaggaaatacaatcattaccaacatataatgcggatcaattagcgtcgattgggcttgatgaagagatgtacaaaaatgttgtaacgctctctaaggaatattatagtaaccatcgcagtgcttttggcgaaggttttagctttacgactgatcccaaaactctaccaactgacacactgaaaagcgatacgattaatcgattgaaatccgaaggggtcacgctagaaagcagttcctatacggtggaaggtagcgattatccaacagaaataattctaactttagatgaaaatttcactttttcagatgttgattgtttggttaatggaagcagtaatccagagttagttcaacaaaccgcatacggagaaaatggcataaagcttagtatacaggcgcttggaagtacaccggcagagattaaaatcaccggaaaagcgaagttgcgagaaggtgtgaatgttccattaattggtgctgtaaattggaatgctacactgcagcaatatgagaaaaaagaatatagtgaaatgccaacaattccatcagagcttgatcctactaccccggatacttcattaatagttagaaaagaacctgtaccgattaaggtcactgcaccaacatatttgaatgagacgaagagttctgtaaaagcaattactaatacagtaaaagattactataaactacaagcattatttgatttatattacggaattgatgcgagtgattctggacaaataccggattttagtaattatcaagtgacattagaaaattctgcgaaagcatcctcgtattattatatttttaataaagaagatgtgattggtagctttgtaaatcttactacagatcggtttgtggcagattatacgaaaaaaatcaaagcttttgagaagcgaattgatgactacaaaaatacaatggctgaggccaattccagatcagaagacgtaacaaatagattaaacgaaacgacgcaagaagctattaatttaaatacaaatctagcgttaacgttgcaaaacctagaatcttggcgagaggcaagcaaaggtttaatagaagaaaatggcgttgttttagaaaaatctggcgaagaagccacgatggcactgcaattaagctccgagtttgccgggcttttagcggaaagtgaatcgttagctgctacttctgaaggtaatttgaagtcagcggaagtcgtgtacaaaacttttgaagcgattgataaggaagccaaaaatattcaacaaagcggagaaactttagtaaaagaagcatctacactatccgatgatttaagcgaaaaattggaagacgacgaaacgttccagaaaaatttcgctaaggttatggaaaatagccgtgttggtgatcgacaaaatgaaaatctatatagtttcttaagtagtccggtcgataagatgaatgctgggactattgttgcgggtgacaaatcaatgccatacttcatgattttgatttgtacgattctggcaattttcactagctacgttatttcacaccaagagaaaaaacgtgaacaattaaatgaatttgagaaagaaatgtcgcttgtctttaaaaatattccaattactttcctagcgatttgtgttgggattattgaggggctcataataggcgccatttcaggatttatttttgaagttggagaaattgggatgttcctatggataggtgtctgcgttctaattatgatgacgttagttactgctttttcatatttattacgtcagttcaacatgattgggatgtcgattattttactcgttttaagtttgtatctattcttaacggatgcagttggacttaacattgataatgaatctattttcgcgacgttcagaacgttctcgccacttcaatacatggaatacttattgaatgggattttaagtgcccagaaagattacattattgtcgtatacagtttgattggggcggctctattatttactggtctcaacctatttgtctggcaccgttctaaagaagaagtagaggaggacgattcagatgaaatttaaaatagcagcactacttatgttactttgttttgcttttgctccgggagttctcgctgcggattcagatagctatttagaaaacaatgggaaaatggacatcaaaacagatagacttcaaaaaacagaagaagaaaaaacaaaagaactagaacagatggaggaaacggagctcgataagaacggaattccactttttactgacgaaatggacgaaaaaatcgccaaagaaaaagcggcagagaaagcggaatatgaccggattaaagactcactttttgaagaggaatctacatctggtgaaacagtgaaaaaaacgaaagagaagttgtttacagacgagtacgagacaacagctgtaaacacggaaacacctactactacggaaacaacagtagaagatgaaacgaaaaaaacaaaacaaaaaacatgttggtggagcaattgcaggaacacttgtagctttagcaggcgggatttatgtggctgcgcgcaatgtttttgaatagaaagcggggagttttaaatggctaaaaacacacatatgaatgtgacagttgatttcactaattggggagcaagcaagtatgatttgcgaattccggtgcatcaaccaatcaaagcattaattatcaatttggcagaaacgctcaaaatcgattacaaagatttgtccaaatgtacgataaaaacaacgaataaagcgatattactaagcgatgatgacaaattgactaattttcaaattgcggacggagacatcttagaaattttatagaaaaaaaggagaataaaaacgatgaataagacaattgaaatggacggaacaacttacgattttacttatgaggatctagtttggagcattacgtttccaaaatcaaaaacacgcgctaaagaactcgcacaactagaactattagaaaaacctgcgacacattntactcctngcaaaatctcaagtgatagcgattcgtatacaatttcttatgagattgcgaaacgtacttatggatttgaacaagttcgaaaaatgggacgtgaagataaactgcgcgcactgcggaatattgcggatttaggcgaattgttaaacacgcgctatacattctttttacacccggataatctgattttcgatattaacttagtgccaagtattgttcatcggggcattaaaaatatattaccgccttatgaactaacagaagaaacttttttcaaacaatatcaatgtttcgttattgcgatgttttctaagaaattctcttttgaaaacttgtacaatggctcgctatcaggggctagaggaacgcaatttgagaagagtatattagatgcaaaaacggtgcaagatattgctactattttagaagaagcatacgtgaaagaacatgcggcggttcaaaaaaatatggcaagcgtaccgaagaaaaaatacagtactttccgtgggttggcggttggtttcattatcgtcgctattttacttgcaattccagtaagttattttgccttcgttaaagtccctctgcaaaatgacttactaacggcaaacgagaatttcctgaaaacagattacgataaagtgattacaggtctagaaaatgtggatccagaaaaaatgccgcagtctgtccaatatgaattagcttattcctatgttaaaggcgaaaaaatgagcgataaaaagaaagaaaacattatgaatacaatcagcttaaaatctgacgccaaaaacttactttactggatttacaatggtcgcggagaatttagtaaatcacttgatattgccaaacttttagacgacccaacgcttgcgatgtacagtttaacaaaacaaattgaacaggtacaaagtgatacaacattaagcggcgatgaaaaagtggaaaaactaaaaactttggaagaaagcttgaaagaatacgatgaaaaagtaaatgaatcaactacaactgaagatgaaacaacaaatacagaagcaaaataagggagaatggaccatgaatagagaggctttattaattgttagtaacgggcagcaatgtcataaaaaccacttgtctcctgaaaaagtcgtgacaattgggaatacaatcgaacacgaaatcacttatcctgaactggctgagtcgattgaagttaaatacgatgaaggctcttggaatgctggaacaacagcgctccaagcgaatcaagctgtaaatgtagagaacttagcattctatctatgccaagatttacatacacaagtttatgatgttgtaacgaatatttctgtgacatttggcgttggaatagaaaatgatgtcacattagatgatacaaaatcagattttatacttttacgtgatgcaaaggaaaaactgtttaagttacaagtattaaatggcgaagtttatcataacttttctctagtaacggaagactgcgttctagaaccgggtgatcagctctatacggacggtgtgacgattacaatcggaaaagaagatattagtgtgctagctgtgaaaaatcgcgtgacgagcaaattagcgcctttatttgctgcggataattcttttggcgaagactatccagattaccaccgttcaccgcggattatttaccgtgcgcctgaagaaaaaatcagcatggcgaaaccgtcaagcaaaccttcaaaacctacagatggtttaattaaaattattttaccaccacttatcatggtagcaattacggtcatgatttcgattttccaaccacgtggactttatattattatgacaatcgcgatgtcggcagtgacaatcacaatggcgattcttaactacataaaatcacgtaaaaaatacaaaatcgattccaaacaacgcgtggaaagctacgatttgtatttaaaacgaaaaacgaaagaattgcacgaaacaagcgaaaaacagcgtcacgctttaacctatcactatccagacgtaactgaactagaaaaaatggcgttacgtgtggattcgcgtatttacgaaaaaacaatgttccatcatgatttcttgactttccgagttggtcgaggcgacgaagcaagtagcttttccgtggaattccaacaggaagagttcagccaagaaaaagacgaacttgtagaagaagctgtgaaaattaaagggcaatatttatctattaatgaagtaccagttgcgacagatttaatgcacggaccagtggggtatatcgggccgcgccgtttagtattagaacaactgcaaatgttagtaatgcaaacatcccttttccatagttattatgatttgcaatttattacgattttcccagaagaagagaaagcggattgggactggatgcgctggctaccgcatgcgaatatgcgtgatgtgaatgtgcgtggttttgtttaccatgaacgttcgcgcgaccaagtgttgaactcgctttatcaaattttaaaagagcgtaaacaagcgcttactgaacaagcgagcaaacaggaaaaattatactttacgccacattatgtggttttaattaccgacgaaaaattagtactcgatcacacggttatggaattcttcaatgaagatccaagcgaactaggtgtttctttagtgttcgtacaggacgtaatggagagcttgccagaacacgtgaaaacggtcgtggatattcgtgatgcgaagagcgggaacattattttggaacaaggcgaccttgtaaaccgagcgttcgtgccggatcatttgccagcagattttgacaaagaagtaatcagccgggctcttgcgccgctaaaccatcttcaaaacttgaaaaactcgatcccagaatccgttacttttcttgaaatgtacggtgtagagcgcgtcgaagagttaaacattgctggacgctgggcgaaaaatgaaacgtataagagtcttgctgtaccacttggcttgcgcggaaaagatgatattgttcaactgaatttacatgaaaaagcacacgggccgcatggtttggtagccggaacaactggttctggtaaatcagaaatcattcagtcttacattatctcacttggcgtcaatttccacccatatgaagtcgcgttcttgctgattgactataagggcggcggtatggcgaacttatttaaaaatatgccacatttactgggaacaattacaaacttggacggcgcgcaatccatgcgtgcactagcttccatcaaagccgaattgcagaaaaggcaacggttatttggcgagcacgatgttaaccacatcaaccaataccaaaaactatacaaacaaggaaaagcgaccgaaccaatgccgcatttattccttatttcagatgagttcgccgagttgaaatcagaacaaccagaattcatgaaagaacttgtttcgacagcacgtatcgggcgttcactcggaatccatttaatcctagcaacccaaaaaccaagtggcgtcgtggatgaccaaatctggtccaactccaaattcaaactagccctcaaagtacaaaacgccagcgattcaaacgaaattttgaaaacaccagacgcagcagaaatcacactaccaggccgttcgtacttgcaagttggtaataacgaaatttacgaactgttccaaagtgcttggagtggtgcggattacgtgccagataaggaaagcacggattatattgatacgacgatttatgcgattaatgatttaggtcagtatgatattttgacagaggatttgagcggattagataagaaggatgatttgactaaattgccgagtgaacttgatgcggtgattgatcatattcatgcgtatacggaggcttctgggattgaggcgttgccgagaccttggttgccgccgctacctgaacgaattttcgcccaagacttacatccagtcaattttgaagaagcatggaaagaaccgaaaaaaccacttcaagcaacaattggtttactggatcaacccgaattacaagcacaagtcccattaacactcgatttaacaaaagatggacacgtggctgtattctcaagtccagggtttgggaaatccaccttcttgcaaagtttagtgatggatttagctcgtcaacataatccagagcagttgcatgtttatttgttggattttggtacgaatgggcttttgccactgatagatttaccgcatgttgcggatactatgatggtggatgaagttgagaaagtgcagaaatttttacgaatctgcctaaatgaaataaaaacaaggaagaagcttcttagccaatatcgtgttgccaatatagagcagtatgaaagagcaagtggaaaagaactacctaatattattattgttctagataattacgacgctgtaaaagatgcaggcttaggggatgattttgaaaaaatcattactcaaattactcgtgaaggtgcatccattggaatgtttatgattataagcgcatcaaggcatatgagtttgagaacacaaatggctactaatattaaacaaatgattgctttatatctaattgataaaaatgatatatcatcaactgttggtcgaacggatacaccacttgaagagtatccaggaagagcgcttgtaaaattagaaacaggtacaacatttcaaacgacgttaccatcgcaaggagaagaaacaattcatcagattgaaggtattcggaatgaaccaaaattaatgagagaaggttggcaaggagaacttccagagagtgtaccaatgataccagac

SEQ ID NO: 3882 - DNA, 5832 bp, Listeria monocytogenes 4b
  misc_feature (1)..(end): n can be any nucleotide: a,g,c or t/u
ctgataggcaacctagcatgcatgctcgagcgccgacgtgtgctggaaagtatatctttactaatgaaaatatcatcttcattagaccgttccttttacctagttccctctaatcccggctaacaaacaattgtcggtatatctttttctcagaagaacaaaaatgcttttatcggagcggttgactaaaaaaagactttattctaagggatacaatgtagttattagccaaatgtggcgaattagacataatttcacttcataaaccggaaatacaactcatttcactactatttttagcatcctgataatagtatgctaagctcacaagattatttctattggaggaaagaccacttaatgaataaatattttaagaacttagcaactgtattatttactgtctcccttttaactacttctattactgccttacctgcgatggcatccgcatatgaagaaacacataatgcctcaactatttatattagccctttagatgcgccccatgttggtgacacgaaaatcactggaaaaaccacagcattatcatcttttgccatagcaatttataccccagaaggcaggctcactggaacattctttggcactaccaatgcagctggtacctacgctgttgatttatccgatttcacttattatgatcctcttggctacgaagctagtggcaatgtaattttagagaaaggggccatggttcgttcaatgacagaaactaatagcgatttaatcaaaacagtaaccatcaactacaactatatccaaacagccattaatgagctgtttctaaataatgatccaacaggaactattttagctgcaacagatcaaaacgctattaacgctgtgcaggaacaaattaatactgtaactagttcagaaaaagaaactttccaagaacaacttaataatgctcaacaacaactggatgcgcgcatagcacaagaacaggcagccatacaagctgtcaaccaacttttcctagaggataatccagcaaactcgattaaagctgaaactacgcaagacttgattgaccaagctcaaacgcttgtcgatgttcttcctgcttccgagttaaaagatacgcttcaggccaacattgtaaaagctcaaacagaactagacgaacgttccaaacctgtaacaccaccaaaaaacgatccagaaactgataacccagaagagccagtcacaccagtagatccagcaactccaacacctgacgaaccatctacaccaacagatccagcaaccccaacacctgacgaaccatctacaccaacagatcccgcaacacctgaaaaaccagaaatcaccactccagaaaatccagaatcaacggtagtagaatctgattctagcgaaaatgaaccagaaaaatccgccgattcaaaaatagtaaacaacccgattcaaattactagtcaagcaacaaaaacagcaacaaaacaagcaaaatccagcgtaacaaaaacaactactttgccaattcctaaaacaggggacactgaaaccacatctagcattttattcggtacacttatgctcgcttcccttgccctttttagacgtaaaaaatagtcaaaacaccggctcaaaatagagtcggtgttatttgttttcgttgactatcttccttatttttgctatattttaactataaatcggaatgttaccgacgaaagccgggcataaccaaatatttttctaagtaccgtgtttttttgcatgtatttagaaaagtatttggtttttttcatagatactttaaaatgtagaaaaggagtttttaacatgcatacaaatacaggatttccagccaactttttatggggtggagctgctgctgcaaaccaattcgaaggcgcttacaacgtcgatggaaaaggactttccgttcaagatgttactccaaaaggcggatttggtcacattactgacggtccaacaccagataacttaaaattagaaggaattgacttctatcatcgctacaaagatgatgtgaaactttttgccgaaatgggcttcaaggttttccgtacttccatcgcttggtcccgtatcttcccaaatggtgacgaaactgagccaaacgaagcaggattacaattttacgatgatttattcgatgaacttctagcacataatatcgaaccactgattactttatctcactatgaaacaccacttcacttatcgaaaacttacgacggctgggtaaatagaaaaatgatcgacttctatgaaaactatgtccgcaccgtatttaatcgctataaaggcaaagtaaaatattggctcactttcaatgaaatcaactccattttacacgcaccattcatgagcggcggtatttctacaagcccagataaattatctcaaaaagacttatatcaagctgtccaccacgaacttgtggcgagcgcgctggctacaaaaattggtcacgaaatcatgcccgaagcccaaatcggctgcatggtcctagcaatgccaacttatccgctaacttccaacccagatgatattattgctgttatggaagcagagcgcaaaaactacttcttctccgacgttcatgtccgcggaacttatccgggctacatgaaacgctatttcagagaaaataatattgaattagacgtaacagaagaagacctagaaatccttaaaaacacagtagatttcatttccttcagctattacatgagcacaaccgaaacagctgacgagtcaaaacgcaaagctggcgcaggaaacatcctaggcggcgtgcaaaacccttacctagaagcatccgaatggggctggcaaatcgatcctcaaggcttgcgcgttgtcctaaacgaattctgggatagataccaaaaaccacttttcatcgtagaaaacggtcttggcgctatcgatcaactagaaaaagacgaaaacggcaactacacagtaaatgatgactaccgtattaattatttgagcgctcatttatcgcaagtgaaagaagcgattaaagatggcgttgacttgatgggttacacttcatggggctgtattgaccttgtaagtgcctccactgctgaaatgaaaaaacgttacggctttatctatgtcgatcgcaacaacgacggcacaggtacgctaaaccgttataagaagaaaagttttgattggtacaagaacgttattgctaccaatggtgaagatttataaaaatgagaaacccaggtttgccctttttaagaggggtaacctgggttttttaattgcttgataacggagtagcaatcatccgaccgagttatcgctgaaataaccgataccccgtccgcacctgctgtgagaacctcagctgaatttgtttcattaattccgccaatcccgacaattggtagcttaattccagcccggcgaatttcttccaaaattgccgttccactcactggctctgcatccgcttttgaaatcgttggaaaaatgggccctacaccaatataatccaccgcaccaagtcgttctgcttcctccgcttcactaaccgaatgaaccgaaagtccgattttcatttttccagcgcaactcgcgataacttggcgaatttcctcgtcgttttgcccgacatggatgccgtccgcgccgatttcgagggctagggcgacatcatcgttaataatgaatggcacttgatattttgcgcataattgttggcattctagcgccatttcttttctttcggaagcagtttggagtgagcctgctcctttttcgcgatattggaaacaagtaattccggctttcagtgcttcttctaacacacctggcaacgttccacgaacaatatcttgcgttccagcgataaaatatacagctagttcagctctcatttcccatcctccaatcggtaggcaaaatggttggttggaccatgaccgtgaccaattccaagcggatatttaatcgcacttgtgataaattctttcgcaaccatgacactatccaaaagcgaattccctttcgcaagttcagctgcaatacatgccgaaaaagtgcaaccagtcccgtgcgtatgcggcgtatcaaagcgctcgctcgtcagccattttgtcgtttcgccatcatagtaaaaatcagccgcctcactcatttcgctatgcccacctttaataacaaccgcttttacacctaaatcaaaaattttcttagcggcttgttcaatttccgccttggttgtgattttttcaccaagaatttcttccgcttctggaatattcggcgtaatgatcgtaccaagtggcaaaagctcgtctttcaacacttgggtcgcctcgttttcaagcaaagcagttccaccttttgcaatcatcacaggatcaatgacgatatttgggaagttgtgcaaacggatattccgcgccacttcccggataatttctgcatctgctagcattccagttttcacggcgctcacttgaaaatcctctgcaatcgcgtcgcactgttcgcggatcatttctaccgggattttatgcactgcttttacacctagcgtgttttgtgccgtgattgccgtgatgacggacatgccaaaggttttacgctcttgaaatgtcttgatatccgcttgtatccccgcgccgccgccagaatctgaaccagctatcgttaatacttgtttgaaaatcatttgtgttcaccactttcttggattttggctttggcccgcgttttttcgaccgaccaactagcaagagcatctaaaaattgtggtcgaaatgaacctggaagttttctttctaattcgatttccgcgtactcagaagccaccgcataactcgcgcatgcttcgacactagctcgaaaagcatcatcctgaacggccataaaactaccgcaaactgcactgagcaaacaaccagaaccagtaattcttggaagcagtgcgctaccattagccacttttgcaaaacgcgttccgtctgaaatcacatctacttcgccgctaataataacaaccgtgctccattcattcgccactttttcagcaatgctcagcacatccgccgaaccaacacccgcatccacgcctttcgcttcccaagcttcaccagcaatcgccgcaagctctcccgcatttccacgaatcgccgtaaactggatttcagccaataattcttgcaccactttacgacggtatgaagtcgcaccaacaccgaccgggtcaagcacaaccggcgttccagcaacatttgccgcacgtccagcaattttcatcgctgtaacaagctccccgtctagcgtcccaatattaatcacgagcacatccgccattttcgcaagttcatccatttcctctttcgcagaagccataatcggtgacgcaccaatcgcaagcaacccgttcgccgagtcattcgcgaccacgatattcgtaatattatgtaccaacggccctttttcccacaccttttccaacgtcataaaatcaaacataattcacactcccacgccaattttgttttttataagccatatcaaaaaatgcccattccatttccacactaatttgaaaagcctgcttcatgagggccagctcccgcgcatccgccatactcgccgcctgttccaccaaccgcttctgctgcaacaccactttttgataattttcatccacataactatccaacaactcttgataaaatggctccgaactccgcgccccttcgtacattttccccatatcagcataaagcgcataacacggcaaaagcgccgcaatcgttaccccaaaactgccaaaatctgccatccgat

SEQ ID NO: 3883 - DNA, 7787 bp, Listeria monocytogenes 4b
  misc_feature (1)..(end): n can be any nucleotide: a,g,c or t/u
ggtattgccttattcaggagcaccaagagttaattcctttgcaacggctctaatggcgctatatttcttagaaaaaagtgaccaagataaagctttacactatttgaatatggcaatgaagatggaagataatgacgaacttggcgcgatttttattgaaattaaccaagcattccgggcgatggaaagtgaagtgacagcgcatatttcacacgatccttttgggcatgaaaatcgctatgagcaacagttaactgaacgcacgccacattatcccgaaacagaaatgcatttttcggctgcgtgtgaagttatttctgaagtcgaaccaatccaagtcgaactcgtcttaaaagagaaagactggaccattctatgtgagaagaaagaaaaaaatgatgtccaaatctgggaagcgctcgttccaccgttagaagaagttggcgagtatacgtattatttccgggcaacaatgaaagaccaaaccactttgacatcagatgattatacagtcgaaccaatttggaaacactggtcagaggaagcggcagtttgtgaaacagagcaaggcttaatggttttatttaaagaaaatccatcaagtatcatcccggtcgagttcaccgcgaaatcagatgaacttgtaatcggattaaaaccttcatttgaagcgagcaatgttaaaacaaaatcatccggccaattgaaaaaagatgatttagagattatcgtttcaaacaatccagtgcgtctcgaagtacattttaaaggcaacttaattctagaatcgcataaaatttacccagcgttacagtggtatacagataagactggcgcaatcaacaaagtgaaactgcatttagatgctccgaaagaagaagagtattacggcttcggtgaacgatacaatgcattaggtcagcgcgggaatgtgcttgattgttttgtttataatcaataccgtgatcaaggaacaagaacctacatcccgatgccgttttatcatacgaatcgtgattatagtgtgttcgttgataccgctcgttacacaagttttgatttaggtaaccaactagcggacaagcatacaattacagtagaaataaatggctgtgacacagatatttatcttttaatgggagatattcgtagtgcagtagcaaattatatgaagaaaactgggaaaccggcgatggtgccagtttgggcgcttgggccgtggatgtctagtaacaactgggaccgtgaatctgtcgttcgaacagaagtggaaacaacgcaagaattgcaaatcccatcaaccgttgtcgtgttagaacaatggagcgatgaagcgacttattatatgttcaatgacgccgaatatgacgaaaaagccccatctgaagcatataattacgatgaaattagattcccttcatggggtagatggccagatccaaaagggatggttgactatatccatgacaacaaaatgaagttaattctttggcaaattccgattcaaaaatacttaaatcgccaacaacacccactaaaagaccgcgaagaagcctatatgattgaaaaaggctatgtagtgaaaaatccggatggctcgccataccgtattccagaaaattggttcacagaaagcttgattatggatttctccaatgaagaaggaaaaaaatggtggtttgacaaacgacaatacttgattgatattggggtcgatggctttaaaacagacggcggcgaattcgtctttggtgaaggtttgcaatttgctgatggtagacgtggtgatgaaatgcgtaatctttatccaaatgactatgtggaagcttactaccaatttgcacaacaaaatgatggcatgacatttagtcgtgctggctacactggcgcgcaaaacttcccggcgcactgggctggagacgaacgttccacttttgatgcatttagaagatcgctcattgctggactttccgctggattttcgggaattccgttttggagttttgactttgcaggttttaacggcgatattccgacggctgagctattcattcgttctgctgaaatggctactttctgcccgattatgcagtatcatgctgaaagtaaagcggaatttaatcaagaccggacaccgtggaatattgcttcacgaactggtgacgattcagttatcccaatttaccgccattttgcgaatgttagaatgaatattttaccttatatttataatgaatcattaaaatgtgttgaaactggtttgccgatgatgcgtgcgcttctgctggactataaagaagatccgcgtgtttctgatatgtatgaccaatacttattcggagaagcaatgctgatcgcaccagtaattgaagacggcgtgcgctccagagaagtttatctgccagaaggaacttggtatgatttctggaatggaacaaaagtgaacggaccaactttacgaaaatgcaaagcggataaagaagaaattccagttttcattcgtggtggaaaagcagtgctatgtaatgtggacgctacattgaaactcggctcatgggttggcaacacagtggaagaatacgatacaccactacttaaaatttatgtggacggtgatttcacagaagaaatgacggatcacttatccgaaaaatggctagtaaaagtaacggaaaatgcggacgaagtagttgtttctgttcaaacaaacacaccggcatatgaagttgaagtaatcggcacgaccaaaaaagtacaaataaagaaagggagataatgatggatgcttccacaagttttgcgattctaccatctaatgtaaaacaaaaaacagctttcgaaagaaaagtaaatcaagtgaaaacggctagttgggcgaataattgcctgactggcacacttgatatcggtcagttcagttgctattttgttaatgaaaaaattgctcgcgtgacggtgaacccatttggagaagtggatttaacgccttcgattgctgcgattcacgatacggaaaaacaagcggctaaatttacagaaacaacggacggctatgagcttcattttgcggataaagagattattatttgtaaaaatcctttccaaattattatgaaacaagctgggaagcgtattttccaaacagaaggattggcaattaatcgctataaagaacaccaaatttcgattcaaagcgaaccaggaaccgcgatttttggtttaggtgaaaaaacgggtgccttgaataaagccggttccattattagtatgtggaacacggatgtatacagtccacataataaagatacagtggagttataccaatccattcctttcatgattgcggatactgcggaaacaacctatggcttattttatgataattcgcatcgtacagaatttgatttccaaagttttgaagaaatgtatacgattttagcagaaggcggacaagcgaatttatatgttatttttggtgaggacacgaaagaagttgtcgcgaattacactgatttaactggtaaaacaccacttccaccaaaatggtcattaggttatcatcaatcaaggtatagctacacctcggaagaagaagtggaacggattgcgaatacttttaaagaaaaagagattccgcttgactgtgtattcatggatatacattacatggatgatttccgcgtattcacttttaacccggatacttttccaaatggaccagaattgattgcgcgtcttcgggaacaaaatattgacgttgtaccaattgtcgatccgggaattaaaaaagatgttgattattctgtttatcaagaggggatcaaacataattatttctgcactaaattagaaggttcgatttattatggggatgtttggccgggtgtcagtgctttccctgattttctaagtacaactgttcaacattggtggggcggtttacacaaattttacacagatttaggtatacgcgggatttggaatgatatgaatgagccgtctgtattcaatgaaagtaaaacgatggatttagatgttgtgcataatctggacgggaaaaatgtaacccataaagaagcgcataatttatatggattgtatatgagtaaagctacttttgaagggttaaaacggcttgtgccaaatgaacgtccattttcactcactcgtgctggttatgcgggtgttcagcgttattcggcggtttggacaggagataatcgtagtcactgggagcatttggagatgtcgctgccgatgattatgaatttaggattatcgggcgttgcgtttaccggtgctgatgttggtggattttcttcagattgtacgaaagaaatgttgattcgttggacgcaagctggggcctttttaccatatttcagaaatcactgtgtacaagatagtatttatcaagagccatgggcgtttggcgcggatgcagagaaaattgtgaaacaatatattgaattgcgctatgcctttttaccgtatatttatacagaattccaaaaaacggcagagagtggtttaccgctcgttcggccgctttatatggagtttaaagatgaacgcgatttaattcaagtgaatgatcaatttatgctaggtgaaaatatcctcgttgcgccaatcgttcgtgaaggccaagtgaagcgtctagttcgtttgccaagagggctttggtttaattattggacaaaagagcagttcgtgggcggcgactatattatcgcagacgcgccgattgataccatgccaatttacattaaagcggggacaattctgccagttggtagcagcgttcaaaatacaaaagagacgcaagatttgacattagaagtttacttagatggcgacgtagcaagcggttatgtgtataatgatgatggtaaaagttaccattatgaaagcggcgcagcatccaaaacaacactcacagctactttcaaaaatggcgaagtactaataaatgctacccatcaaggtgaagcaaacttgcaacataaagtaactactatacaagtttttggagaaaaaacagacaaaattacaagggcgggaatttaatctatgaaagaaaaagattggtggaaaaaaagcgtagtgtaccaaatctatccaaagagttttaatgattcgaatggtgatggagttggtgatattcaaggaattatcgagaaattagattatttaaaagagctaggtgtggacgttatctggttgtccccagtatacgattcgcctcaagatgacaatggttacgatattcgcgattatcaaaaaatttacgaagagtatggagatatggcgacttttgatcaattacttcaaggtttacacgaccgcgaaatgaaacttgtaatggatcttgttgttaaccatacttctgatgaacacaagtggtttgaggaatccagaaaatccaaagacaacccgtacagagattactatttctggcgcgaggaaaacgaaatcaataactggggctcgattttcagcggtccagcatgggaattggacgaaaaaacaggtgagtactatttacacctgttctccaaaaaacaacctgatttaaactgggaaaaccctaaattacgccaagatgtatataatatgatgaaattctggctagataaaggcattgatggcttccgcatggacgtaattaattttatttccaaaaatactgatttcccagatggtccagtaccagatggtcaaatttatggcgatgctggcaatgatttttgtaatggaccgcggattcatgagttcttgcaagaaatgaaccaagaagttacttctaaatacgatgtgatgactgttggcgaaatgcctggtgctagtacaaccgacgcgcaaatttacacgaatccagcaaataatgaagtcgatatgatttttacatttgaacatatgaacttagattccgatggcgacaataaatgggatctaaaaccaatctacttaccagatttaaaagaaaatatgtctgaatggcaagtggcgcttcaagaaaacggttggaatagcttatattggaataatcatgaccaaccgcgtatcgtttctcgttttgggaatgacaatcgtttccgtgttcgttcagcgaaaatgcttgcaacttgtttgcatatgatgaaaggaacgccatatatttatcaaggtgaagaaattgggatgacaaatgttcattttgaaacgctagatgattaccgtgatatcgaaacgctaaacatgtacaaagagcgtaaggagcaaggacacagccatgaaagcatcatgcagtcgatttacacaaaaggccgtgacaatgcgagaacgccgtaccagtgggataatagcgagaatgctggcttcacaaccggaacgccttggcttaaagtcaacccgcgctatacagaaatcaacaacgaagaagcgctgaaaaacccagattccattttctactactaccaaaatcttattaagttacgaaaaacgactgaaatcatcacaactggtaattatcgtttgttattacctaaagatgaagcgattttcgcatatgaacgctacacagaaaatgaaaaattagtggttttatgtaatttcacagaagaagaacaagttatttctgatgaaaacattttgaacgaaatccaaaaaggttccgtgcttgtaaacaatgttcctaatattatagaaggaactttacgaccttacgaagcaatcgtttatcaaatcaagtaaatctcaggaaagccaccaattgctaggtggctttttttgtatgcatcaaaaattatagtataatagaaggaaatgattttattaggaggaattctcttgctatttgatacgcatgtacacctcaatgacgaggcttttgatgatgatatagaagaagtaataaaacgcgcacaggaaaacgatgtgactcgcatggccgtggtgggctttaataaagaaacaattgaccgagcgcttgaattagccgagaaatatgattttatctcattaatcgtcggctggcatcccacagacgctattaccttcacagatgaagatttagaatggctccgcgatttagcacttacacacccgaaagtagttgctttaggcgaaatgggcttagattatcactgggatacttcgccaaaagaaacgcaatttgaggtttttagaaaacaaatccgtttagcgaaagaagtgaatttaccgatagttattcacaaccgcgaagcaacagaagatgttgttcgtattttgcaagaagagcacgctgaagaagtaggtggaattatgcattgctttggtgaaactgtcgaagtaatggaagcatgtctagcgatgaatttttacatttcattcggaggaacagtcacttttaaaaacgcaaaattaccaaaaattgcagctcaagctataccaattgaccgtttattaattgaaactgacgcgccgtatctcgctccaaccccaaatcgcggaaaaagaaatgaacccggatacgtcaagttagttgccgaaaaaattgcagaactgaaagaaatgaaatatagtgaaatcgctacgcactcaacagaaaacgcaaaaaaactatttaaaataaaagattgattgtaacacaattgtaatataagggccagtctgtaacccaatcttaagcttcacggagataaaaatgatgactgggacaaaaacccttattttatgcctacgaccagagatgtagaaaaatgacacatttctgttacatttgacactttaaaagaataatatttttaaaaacggctctatat

SEQ ID NO: 3884 - DNA, 6921 bp, Listeria monocytogenes 4b
  misc_feature (1)..(end): n can be any nucleotide: a,g,c or t/u
gatatggtagccgagaccgtgaatcactttaattttatttagaataaatgcgtttttatcgttcgcattaaggtggcgtttatgcccggggacatcgaaaatatcttcggtcatttctacagttatacgatgactctcgctttttaatttgtctagccagtggagtgtttctatgtaaaaaagctgttgtggcgcaatatttatggcaaatcgatcatttggatatttctttaaaacgtctaagaacgcctcgctaaaccactcggaaaaagctaaatacagttcttcgtccgcgagtacagcttctaattctgatagaggaaatctaggaactgcactatcatcacgtaaaagtatttcatattcgacaatatttccctgaagaacatctaattttggttgaataaaaagctgaaatttcatgagtcccatcatcctttctcatttctcttctctattctaatacatttttagtactaatcgcaaaatttagtccaaaaacaaacaggcattccggaaaatgcctgcaaattattctttaaaatatttctttcatcatttgaacaatttcatctgccacgtcttccgcttgagggaaaatcccgtatttatcaatgaaagcatgacacattccttggtaaacgattgcttttgtttgcacaccacttgctcgcagttctttagcaaaaatatctgcaaaagctcgtaacgcgtcaaactccgcactggctataagtgtaggcggataaatacttttatctacggccgatagtggagaataaattggcgatgcgggattttcgtctctaacataggccgtccgcagtaattcgccagagctgttcattccaatgatacctggtgcaacgagcggaagtgtctcttctgatgccccaaacttggaaatatcccactggtacttatcattatcttcatctactaacgttagcgctgggtaaagtaaagcttgaaatcctacataattcgtctctgcttcataatccatatagctcaccgctgctgctaaagttccacccgcgctatctccagaaacacctattttcgaagcgtcgataccgagttcgtcgctttgttccactacccattcaagcgccctgtaacaatcttttggagctgctggtgccgggaattcgggagctaaatgatagtccacattaataacaactgccggtaacttttccgcaatacctttacaaaagttctccacaacagccggcgttccaccaacaaagccaccaccatgataaaaaatgaatgcgggaactggtttggtcgcttcttcgtgacgataaattcgtaccggaatatcgccatagtccccttcaacaacccgatattccgtagttacaccgtttgataaatcaatattcggacttcccatcgttgctcgcatttgtagtgcagctgccgttgctatttccaaattagaaaaatctggcatttggatttcttgcggcgcttcttttatcgcatcattcgtaccgccaagatgttgtttcaggtcttttaataaaaaaggatccaaattccctcgaactgtttcttgtgcctgtttaaaaataacttctgttccttcttcttgttctagaatgctatttgattttataaacgctaaagcttttttatattccatccagtcttccttctctctgtcttattttggaattctaactcgatttgcgccagttttctgatggtggaaacccgtaatatttcttgaaaagcttgctaaaataataagcatcattatatccgaccatatttgcggcctgttttacggtaacgtctttattcttgagtaattcttctgcacgagtaagacgaattttgattaagtagttaattggtgattccccggtttcttctttaaatactttggagatataggcggggctaatgtacatcgtttgcgaaagcgttgagagcgagacgtcttctgtgtggtgtttttccatataatgaataatttcgtttacaagtatctgtttttgctgctcgtcggtagataatttgacgccgttattttcaagttgttctggggtggcttcgcgtaaaacatgtataattaattgcatgacgaaagcctttaaaatcaagtcatatcctggtttttctgcgtctttttcttctataatttgtttagaaatagataaaatggcagattcttcttctttttttcgtaaaaaggcctttttaaacgggaacgtatttcgcgtgtatccttccagtgcaaagttccgaaaacctatatggagttgcgcattcgtcatacctggttcggttatatcgtaatgattcacaccaggattaaaaatcagcatatcgccttttcctagcttgactcgctcgccttcaatatcataaataacgtttccctcacaaataatcgagatctccaaaaaatcatgatggtgattttcacctacgcgcacctcattcgtataacaattcgcgatatacaaaatttgcggattaaatgtggtcgtatttattttcagcatcacttcacctcctcgttataacgcttacatttatcttttaattatataacattgtccatgcttacagcgaatataaaccattctttttcgaaattaggagtgtaaactaaatggatatatgaatattaaaggatgtgaaaaaatggagagtatgaaatggatttggcaatatgtccgaaaatatcgtctacttatgattggtgtatttattttaatttttatcgcttcaggtattagtattatttatccgttacttggcgggaaagtgattgacgatgttgtctatcaaaataaaacgaatttgcttatcccgctacttttaatcatgattatttcgacaattattcgaactatttgccgttatacctatcagattatgtgcgaacgaattgggcaaaattcccttttccgaattcgagaagatttatataaaaagttgcaatcactcgattttgattttttcaataatacgcgcgttggggatattatggcgcggatgactggtgatacggatgcgattcgtcattttgtttcgtgggtatcttacaacattttggaaaatgtatttttatttagttttgcaattatcataatggccgcgattgactggaaattaacgcttgcgcttgttatcgtaacgccgcttattgctattttaacgatgaaaatgtcgagtaaagcccaaccagttttttatgaaattcgggagagcttttcacggctcaattcgatggtggaagagaatattagcgggaatcgcgtcgtaaaagcctttgcgcgagaagattttgaaatgaagaaattccatgaacacaatgaggatttcaaaaaacgtaatctagattctgccgatgtttccagaacctatttgccagtgcttgattcgctcgcgggcatgctcgttgtcatcacgcttattttcggtggctatttagtaattaaaggccaaatgacgctgggagatttagttgccttcaatggattcctatggatgctaaacggcccgatgcgcatgagtggctggctgattaacgacgttcaacgctttatcgcttcttcgtttaaaattcaagacatgatggcaactgacgctaaaatccccatccacgctgaaaaacctgcgccatcacttcaaggtcacgtcgagtttaaaaatgtcagttttcatttcgaggacgacccaaacacggacgtactcaaaaacatttcactaaaagcttctccaggccaaacgattgctattctgggtgaaactggcgctggaaaatcaacactcgtcaacttaatttgccgattttacgatccgacttccggtgaaattttaattgatggtgtcgatgcacgaaaatggcatgtgcgggaacttagaaaccatatcgccacggtgatgcaagatattttcctattttctgatacgattgaaggaaatattgcatttggcgctccggatgcaacaatggaagatgtccggtgtatggcgcgaattgcagacgcggaccacttcatcgaaaccatgcctgaaagttatgacacgattgttggtgaacgcggtgtcggactttctggcggacaaaagcagcggatatctttagctcgtgctcttttaaaaaatccatccattttgattttggatgataccacttccgctgtcgatatggaaaccgaagtgaaaatccaaggtgaattaaagaaaatcacggaaaatacgaccacatttatcattgcgcaccggatttcttctgtaaaagaagccgatgaaattttaattttaaatcatggcgaaatcatcgaacgcggcacacactctagtttgctagcagaaaaaggttattattttgatatttacaataaacaacttggaacggaggcgaatgtgaatggctagaaataaatttgatattgacgaagaactggaaacagcattcagcgccgcacatttaaaacgtattctcgtttacgtaaaaccctatcaaaaatccatttatattacgctctttgtcatcttattagcaaatgtagcaacaatgattggcccgtatttaaccaaaatagtcatagatgatacgattccaaacaaaaacatgacacaactattctggattgcgattattttcatagtttctgtcgttgtaaccggactttgtatgcgataccgcattaggtcgattacgcttattgggcaagacattttaaaagatatgcggacagcgattttcggtcatttgcaaaagctgcctttctcttattttgacagtcgcccgcatggtaaaattttgattcgtgttgttaattacatcaatatgctcagtgatttattgtccaatgggctgataaatctgatttccgatattttaagtgtcattgtaacgcttggttttatgttgatgattgatccagtgttaacgttgtatagtttagcgcttatcccggttcttttcgtgattgttatggtcattaaaaccgcgcaacgaaaagcttatcaagttctaagcaataaacaatccaacatgaacgcctatatccatgagagcatcgctgggataaaagtaacgcaaagcttttcgcgagaagaagagaattttgagattttcaccgaggtaagtaatgagtaccgccgttcttggatgaaagcggtgaaaattcaattcttgctttggccaggggttcaaaatatcgccgtaatgacgacttgtttaatttacttcgttggaatcaaaggttacggtgtggacgtttctaccgggacactgattgctttcatcggttatgttgggaatttttggaatcctgttattaatattggtaacttctacaattcgcttattaccgcaacgacttatttggagcgaattttcgaaacgatggacgttgagccagatattaaagatgtcccaaatgcgaaaaaaatgccaccaatcgtcggaaatgttgactttaaagatgtttatttccgttacgaggaaggtgtggacattttaaaaggaattaattttcatgtggatgcgggtgaatcaattgcgctcgttggtccgactggcgctggaaaaacgaccatcataaacttgctcagccgtttttataatataaattctggagaaattttagttgatggggaaaatgtcgaagaagtcacgcttagatcactcaggtcccaaatgggcgtgatgctccaagatacctttattttttcaggaacgattattgaaaatattcgctacgggaagctagatgcaaccgaagaagaaattatcgcggctgccaaagtcgttcgtgctcatgatttcatttccggattaaaagatggctactataccgaagtaaaagaacgaggtagcactctttcggccggtcagcgacaactgatttcctttgcccgtgctcttttagccgatccgaaaatcctcatccttgatgaagcaacttcaagtattgatacacaaacagaaatcctactccaagaagggcttgagcgactgctggaaggccgaacatccttcattatcgcgcacagactttcgacaatcaaaaacagttcgcgcatcttctacattgataatggtcgcattcaagaagctggcagtcacgaagaactgatggcacagcacggctactactataatttatatcaatcacagtttgatatgttgcaagctttatagaaaaaaggtaactagagattctagttaccttttattttgcgcatccatttgtaaaaagaaattatacaatgctccgtacaaattcgcatcattttggaaatgacaagtgacgattttcggttgtgcggcatgataaggattagcatcttttatttctgcgacagcttcgtttagtctatcaacaacaactggttgagcgctaatgccaccaccaattgcaataatttccggatcaatcaaatactggatatttaaaatttgagatgttaattcataaatatacacatcaaaaatagcattcgcttcttcatcgccttggttaattaattcgaaaacctgctcaccatcttttttattgggtaaattcttctttgatgcaatgcgcttaattaactccaccgctgatccagttcttccaaagaatgtacctcgcaatttcttcgtatcaaaagaagtctccataaaactaacttctcccgccatcaaatgatagccagattgtaatttaccatccataataattccgccaccaacgccacttccaagcgttaaaatcgccgcgctatgtacattttttgccacacctaaccaaagttccgctaaagccgcactcttcgcatcattttgcaagacaacgggaacatgacattcacgcgctagcatttcagccaaatttttctcatgcataactttccagcacactggtggccgctcgaacgtgcagcggccgtcccaacgat

SEQ ID NO: 3885 - DNA, 10199 bp, Listeria monocytogenes 4b
  misc_feature (1)..(end): n can be any nucleotide: a,g,c or t/u
attcaaagtgagtggaaattttaaaaaggcgaaattggaggttacatcaatttgaagaagaaaaagcgattcaaacagaagttgctcatcgcaagtcttgtaatcggattaatggctgtactttcgggttgtggctattcaactgatccaattacatcagaatcaactggattttggagtcactatattgtatttccattgtcctggactattacttggttttccgatttattcgggggaagttacgcagtcggaattattgttgttaccattttaatccgtctacttatcatgcctttaatgatcaaacagctgaaaagccaaaaggccatgaccaatttacaaccgaaaatcaaagaactacaagagaaatactcgtctaaagataatgaaacaaaacaaaaactacaacaagaaacaatgcgtctatatcaagaaaatagcgtaaatccaatgatgggttgtttaccattattaatccaaatgcctattctactaggattttaccaagcgattagtagaacagcagaaatcaaaacagattcattcttatggatgcaactgggaaatccagatccatattacatcttaccggttgttgcggcattaacaacattcttgtcatcaaaaatttctatgatggggcaaacacagcaaaataaatcaatggcaatgattgtttatatcatgcctgtaatgattctatttatgggtattacactaccgtctgcccttgctctatactggattatcggtaacattttcaccgtattccaaacacttttaattaataatccttttaaaaacaaacgcgaacaggaggcgcttgctgctgctcaagttgcggaagatcgtttgaagaaaaaagcagctaacatgaaggcttccaaaaaaggaggtaagaaaagaaagtgagagatataactgcgcaaggctcaaacgttgaagaagctatccaaaatgcattagccactttagaaacaacacgcgacaaggtcgaagtagaagttctagatgaaggtaaaaaaggtattttcggaattggttcaagactggctatggtaaaagtaattgaaaaagaagatggtatccaagtagcgattgattatcttttagatgttgctaccaagatgggtgcagtaatcacaatcgatgtagaagaagttggtaaagatgtgaagttgcaaattaaaggtgacagtctaggtatgctaattggcaaacacggtcaaacccttaatgcacttcaatacttaacacaattaattgctaataaaacaacgagccaatacaaaaatattattgttaatgtaggggattatcgtgaaagacgtcatgaaacgttagtaattttagcaaataaaatggcagataaagctcttaaaacgaagcgcgctgttcatttagaaccaatgccttcatttgaaagaaaaattattcatgctattttaagcgagaatgaacaaattgaaacgcattctgaaggacgcgatccttaccgttatattgtgattaagccagttcgcaaataaattcttagactgaggttttaacgaacctcagtctttttttaggaggatacttaaatggcgatttataaggattcagtgcatgaaatgtgggagaaataccggacagaatacccgatgatttcaagtaagtttgaggcatgggcatttggtaactctaatcagatggcgaatgagcttggtgggcttgttatggatgggataaaaaccggcacgagcagcttgttttattggtatgatcaaggcggagaaacgatgccgtctgttggttctcatgtagtgcttttagatggtaatgaagaagcaatggggattatcaagttaacaggtgtaactattatgccttttaatgaagtacctgaaacgtttgcttatttggaaggagaaggtgacagaacgctagaatattggcgagaagtacatacatcctttttcagtaatgaatgtgtggaactcggtattccatttgaagaagatgctctagtggtttgtgaagagtttgaggttgtttataaatagaatgtttcacgtgaaacaatagaagagtactgcgattaatgcagtactcttattttttatttcttacttcattgggtaagagattgaatgtttttttgtataaggagtagaagtaagtcttgttactaaagccaactttttcaataatcaactcaattggagtggaagtggtttcgattaaaagatttgctgcgagcattttttgtttattgactagttcggtaaaagtgaaattggtattttttttaataaagttactgaggtaatttttattgtaacctaatgtatccgcggcacttgttaatgtgattgtccgatagttggattctataagcttaataacttcgagcatggtggaagtggtgcttgattgtgagttggtaagatcatcagctaaatatgtatcacatttacgtaccagttcagtgaacagaattggcaaataaagagtgataattcttgatgaaaattcttcttctaaaaaatattctgtgataatttggtttaaaatttgttggatatgcggaatttgcgcactttgaaaaataatatatttctttaaagattgctcgcttacgctggaatgaagaagaaagtcgaatagaaggctgttttttttctttatactcgttagccattctaggctgatttgttggtcacggaaaaggatgttgatgagaatgtctttttcgcctgttgctttgatggaatgatggcagccactgtctaaaagtaaaagttctccttcatgcaaagtttctttatttccttcaatgacttgttcggagcttcctgaatacatgtaatttagctcaagaaattggtgtgtatgataaggatagtccgcaaatcggttgtgtttgcttatataaatgtctttgtttttgaagaaataatcatttaataattccatgctgccgttctcttttaaaaaggatccattgggtaaatcgggaacaaaagtgccagtgcttttttggattttttcttggaagtttagacgaaataattttttattaagcgcttccatttcacaatctccttctgtaaatttgatactttaattataaacacaggatattgtaaagcgcaatcattaattgtttaatataaagtaagcgcttaactaaaataagtaggagggttaaaagaatggctggatcgagtacaagtaaaaaaggaacgatagcggtatctttgacgaactatttagattctggatgtattgcagcgggagcaagtggactaactttgtgggcaacacaattcggacttagcagttttgcggtgggattacttggggctgtgagcgcgaatgcgtttggttctgcaattggcgcacttattggtggtcatttagcagataaatatggacggaaatttatttatacgtataacatgttggtgtatatgcttggggttacaatcattatgtttgcaatgaatttcccaatgctattaattggatttttagttacaggtctttctgttggggctggggttccggcttcatggacatatatttctgaaatggcggatcctagtataagagctagaaatattggtatatctcaatttgcttggtcatgtgggccagcaattatctttactttaggaattattgtatctccacttggacttttaggtaaccgcttacttttcttatctttattgattgtagcgtttgttgcttggcagttacaacgtaaattagaggagtcgaaggactgggaagcggagcaagtgaaaatgaaagaaagtggtaatcgtttggaacacccttttaaaacagcattttctagtatggtaaatgtaaaatcagtacttttcttagtgggtgtgtacttattttggaatttagtagcgggtgcaatgggattctttatgccgtttgtatatgaaacggtgggtggtctttctaatacacaagcgaatttattgcaagctgtattatggatactcacagcagcttctacatactttggctttgctaaatttggtgatcgagtaagtcatcgtggattgttttttgtaggggctttaatggcagttgcttcttgggttgtacttacttttgttggaatgtcttgggttggcttatggacatttgttattttatggggtatttcagcagggattggtgcacaagctttttacgcactttggtcaacagaactttttccaacaaaatatcgtggtggggttcaaggcgtgatgtttttcttagttcgtggtagtacaggtgtctggtcgattgtgttcccagtaatcttggcaaatcttggctttactgtggcggggacaattatgattggtttacttacagtgtcgcttttaatcggtgtaatttgggcgccgaaaacacgtggcagatcacttgatgatattacgaaggaacgttacggaaatacaattgattaaagaaaaggagctagaccagtgaaacattatgttgcagtagatattggtgcatcaagtggtcgattaattctagggaaattggtgaatgaaaaattacaattagaagaaattcaccgttttaaaaatggttttacgtaccgagatgggcacgaacgctgggaaattgatcaactgatgcaggaaatctttattggcttggaaaaagtaaagcaactaggaatttcggaatgtgtgcttggtattgacacgtggggcgttgactatgttttgataggggcttccggtgagaagttggcagatccaattagttaccgcgataaacgaactttaaatgcggtgcagaatttaacgagtgagtatccacgagaatatatttataaaaaaacaggtattcagtttatggaattaaatactctatatcagctgtacgtggaagagcgagatttactagaacgagcggagaaaattttgttgattcctgactatattggttatgttctcacgggggttaaggtggcagaaacaacaaattcatcgactacacaaatgcttaacttgcgagaacaattatttgataaggatttactttcgcatttgaacattgatgtggaaaaatttgcgccactgacggatgcaggtacgtatttaggtaaagtaaaagaggagtggctagaggagtatgatattcctaattgtgatgtagtgacagtggcaacacatgatacagcttcggcagtggtgggaactccggcagaaggagaaaattgggcattcttgagtagtgggacttggtcgctaatagggatggagctaagtgcgccaattaataacgaagcagcttttaaagaaaattacacgaatgaatggggcgcatatggaacttatcgctttttaaaaaatattatggggctttggattgttcaagaaattgcgcgcatggacgactacaagcatagttttgctgagatggctgaggaagcgagtaattatccttatttcaagcaaattattaatgtcaatgatgccaggtttaataacccggaaaacatggtggatgagattaaattgtattgccaagaaactggacaaactataccggagacgattggagaactgacaaattgtgtgtatggaagtctggcactctattatgcactagaattggagaaaatgactgaaattactggtaagaaaatcgaaaaactttatattgttggtggaggaagtaatgtagctatgctaaatcaattaacagctaaacttgcagggatagaagtatttgcgggaccttctgaagcaacggcgattggaaatttagttgtacaaatgattaatcaaggtgaaatcgaatctatgcgtgcgggaagaaaaattattcgaaattcatttgaaattggcgaattttcttgtggtgatgtgagatttgaggaaataaaagaaagatttactaaggtacttgaatttaattaggaggcttttagaatgggacaagaaacagaaattagtaaacgataccaagtggcgaaagaacgttatcaagcaattggagttgatacggaaaaagcgcttaaaacactgaaagacattaaaatttcgatgcactgctggcaaggcgatgatgttaaaggtttcttaaatccagatggcgaacttacaggcggaatcatggcgaccgggaattatccgggtgcggctcatactcctaagcaattacgccaagatttggaaaaagcttattcacttattcctggaaaacataaacttaacttacatgcaatttacgtagatacagatgaaaaagtagatttaaatgaaattgaacctaagcatttcactccatgggtagagtgggcgaaagagcagggtttgggtctggatttcaacccaactttcttttcacatccaatgtttaaagacaattacactttagcgtcaccagataaagaagttcgcgatttttggatagagcacgggaaacgctcgcgcaaaatttctgagtactttgggaaagaacttggtcaaacaagtattaataatttctgggtgccggatggtataaaagattgcccgattgatcgctacaccccgagaaaacgtttgatggaagctttagatgaagtttttgcagaaaaattagatgaaaaatatacccaagaagctgtagaaagtaagttgtttggtttaggcgcagaggcttatactgtcggttcgcatgaattttatatgggttacggaattacgcgggataaattgatttgcttggatgcgggacatttccatccaactgaagtcatttctaataaattatcttctttggcacttttcagtaaaggcgtaatgttacatgtgagtcgtccagtccgctgggatagtgaccatgtggtgattatggatgatgaattaattgaaattggtcgcgaattggtgcgcaatgatttacttgggattacaaatatcggtcttgatttcttcgacgcaacaatcaatcggattgctgcatgggttgttggaactagaaatacgcaaaaatcattacttaaagcccttttagaacctacagctgatttgaaaaaaatggaactggaaaatgactttacatctcgtatggcaattacagaagaactaaaagacttcccatttggcgatgtatggaactacttctgtgaaattaatggtgtcccagttggtcttgactggttgaaagaagtaaaagcttatgaagaagatgtattactaaaaagataggagatagtgacgatgacaaaggatataatggatgctgtttttattaaggaaatggcgaaaactacttcaaatttataccggttaggctgggatgaaagaaacggtggaaatatcacttatttgttggatgaaaaagaagttgtggaatatttagatgtaaagcaaatcattcgcacaattccaatggactttgatggtaaaaagcttgctggcaagtatttcttagtaactggttcgggtaaatattttaaaaatgttgaagaagctccagctgtgaatttaggtgtaattcaagtgagtgaagacgggaaagcagttcatttgttgtggggctatacagacggcggactaccaacgagtgaacttccagcgcattttatgagtcacattgcaagactttctgtggatccggaaaaccgcgttgttatgcattgtcacgctactcatttgctcgcgatgacatttacacatgagctaacggaacgagaatttacaagaactttatggcaaatgtgtacggaatgtttagtcgtttttccagaaggtgttgggattattccttggctggttcctggtacgaatgaaattggagaagctacatctgaaaaaatgaaggaaaatcgtttaatcgtttggccacatcacgggatttatggtgcgggaaaatcaatggatgaaacatttggattaattgaaaccgcggagaaagcagcagaagtttatactattgtgatgtcacaaggcggtattaaacaagcgattacagatgaacaattgaaagcactgggtgaaagatttggcgttgaagcaaaggcaggttatttaaataattaggaggtaacaataatggaacgagtggcatctattatgtatttatatcctggtaatcaagaagaatataaaaaaagacacgacgcactttggccagaaatgaaagaggctttaaaagcacatggagcagctaactattcgatatttctagatgaaaagacggatacattgtttgcttatgtggaagtcgaggataaagccatttatgacaaaatagcagaaacagaaatttgtcaaaagtggtggaaatatatggctccaattatgaaatcaaatcctaataacagcccggttgcattagatttaaaagaagttttctatttagcataagaaaagagacatgactttaacgcaaagtcatgtctcttttttaaatatttttcggtaaccggaatacaagtaggaaacaaacaacgagcagaacaatattgacgtacatactcatttgcaaactgtcggaaaaggcgcttgcttttgaagtagcggcagtatttccaagtgtgcggaagaagactgagccaacaacagcaatcccaaaggacgatccaattcgctgcgctgtattaaacataccactagctccgccgcgatccacaccagttactgtggaaagggtgaaactattcaatggtgcaatagtcaaaccactgccgataccagcgatgaaaagaggtaagaataagagccaagcagaaaaagcgccgtcgttcaaatggaaaacaatagacacggtgccaagcccgatgataacaagcgcaactccaagcattaagagctttctacctaatatagggattagtcggtaactattagaggcagctaacacactacctaacgcaaaaggactaattgcaagcccggataaaatagccgaacgattgaaaccagtttgccaagttagcgataggacgaagaaaatactagtaaaagcggcaaagtatacaagcgataaaagcatacctgaaacaaattgattatttttaagtaggttgggagcaattaatggctgatttcctttcttttcttggtagacgctccatttgtaaagaatgataaagagtggaatagatagcgccattaaaaagtaatccactggtttgaagtcatttgcgccgtttgagataagtggaaaaagtaatagtaaaagtgcaatggttagtagcccaactccaggcaaatcaaaactaatttttttcgtggagacagttcttttgggaagataaagcattgctaggactagcgttactaacacaaaaggtacgttaacgaaaaaaactgcacgccaaccattggtagttccgaaaagttcaattaaaagacctcctgtaagaggtccgatggcagttcccacaccaataacagatccaagaattccgaagattttcccaaggctttttccagaatacatatccataattgtggcattgatttgcgggaaaaataatccggcagcaagtccctgtattacccgggaaataattagactattttcggaatctgcaaaaccagctgtcacactcataattagaaatagcgtaatcccgataatgtagatattttttcggccaaatttatccccgagtcgaccagctaaaataagtacaagtccaaaagcaagcgcatagcctgaaattacccattcgatggtttcactcgtggcatgtagagcagttgtgatatcaggtaaggcaacgttgacaattgttgtatctaataatgaaataaaagctccaagcataattgaaataagtgctaaagtattacgtttattcgtctgttccatgaatcattctccttttttgaagctttttgagatattttccattataaacctaaaaactctgatgataaagaaggagcgaatgtttcacgtgaaacattttactttgcgagtaagatttgataagcttcttttattaaaagggcgggggttaacgtatggaaaatcggaagcaaatgataaaaacggaacgactttttttaagcgaaatgacgttagctgatactgaaatattgtttggttactggtcagatgattctgttactagatacatgaatattgaacctttccaaagtttgcaaccggttgaagaaatgattcggatgctacgacaactagaaattgaaggaaaggcacttcgttgtgtgattatt

SEQ ID NO: 3886 - DNA, 12278 bp, Listeria monocytogenes 4b
  misc_feature (1)..(end): n can be any nucleotide: a,g,c or t/u
gcggactcaaacgaaaacggagaaaatatgttcacataatcctcaaatcgtagcagtttagacatccctttatctccgccatgcggccaaataaagttatacatgttatctaaagtaggatttaacacgctcggcagtaacatcacaccaaatgccacaaaagccgcagcaataggcgaacctatcaataaaccaattaaaatagctactaaaaatataagtaaataagtaaataatccaccaactatatccacccaaaattttggtgcatctaattgaatatattcttttggaacatgcgacatgaagtatgtcaacccaattcccatcgagataagataactcagcccaatggtcgctattcccatcatcattttaaccccaactatgtgcgtccgtttatatggtaatgatgccgtaaaacgattcgctcttgtgtagcgctcaaaaataactgccaaaacccctaaaataaaaacactcaccttaatcaatgtaaaaaacatttctacttgaaaataaaacataaatggcatgtaatctacaaactcatcttgaacaaaatttgtatacattggaaccgctaaatacgccactgtcaaactagctttcatttcctcatcagaagttttaaattcaggattttctttctgttgctttaaaaactcacttgattcgtagtactctttttgactattccatctatctgcgtctgacattagtcccaaagtaattcctaagaaaaatagtatcacaacacccaaaagcatccatctcatattacgccattctcggtaccataaacctcgattaaacattattagccttgtccctcctgtctgttttaaatctcgtaataatctattttatcatttgctaaatgcaccgtgaaaatgtcttctatcgagatcgacatttcttctagcaaaaccggttcttctaaacgcaattcggcaagaaaactgctagcattttcagtcactagaagcgtgtaaatccgcccattacgatacaataattgcgcgttatttttcacaaaatcaggtatttttttcgttttaaatgcaacttgtattttcaccgcatcggtccgcatatcttctaaataataatccagttccacgctcgcgccctttagaacaatcactcgatccgcaatagcctcgagttcttccaaacgatgagacgcaatcactacacttgttcctcgttttttcaccgtgtcctttatcgttgctaaaatctgctttttaataatgatatctagcccatccatcggttcatctagcagcaagaatcgaacattaagtgaaacatctaaaataataaaaaataaggctttccgtccctttgaaaaagacattaacttagccttcattggcagttcaaatcgctgcattaattcattaaaaaaagcctcatcaaaagtcgtataaatttgtcgatatatcttaacaaccgtctgtacactatatgtattaaaatgattcatattatcttccaagaaaaacagctgttgcttcacttccgggtgcttaaaaatactctcttcacctaagaaaacatcgccctcatcaggcaaataaattcccgtcatcgttgaaaatagagttgttttcccaacgccattgcggccaattaatgcagtaatctcccctgcttttaaatcaaatgaaacatccttcaaaaccaagttatcgtccatctttttagttaagttccgaattttcattattccacctctttcactcattatataagctccggaatattttttctacatttttaaaaattttctaccaattcgctataaaaagttacaaaccaatcattatactaatttcacatattgcggtaaaatatccctatatgaacttatttaaaacccctgaggtgaaaacatgataaaacttgatatgaccatgcttgattcttttaaagaagaccctaagctccggaagcttttattttctggacattttggtttagaaaaagaaaatattcgcgtaacttctgatggaaaattggctcttacgccacatcccgctatttttggtccaaaagaggataacccatatattaaaaccgatttttcggaaagtcagattgaaatgattaccccggtaacggactcgattgactctgtatatgaatggcttgaaaatcttcataatatcgtttcgttgcgctcagaaaacgaactactttggccgtctagtaatccacccattttaccagcagaagaagatattccaattgctgaatacaaaacgcctgatagcccggatagaaaataccgcgaacatttagcaaaaggctacggtaaaaaaatccaattattatctggcattcattataacttctcattcccagaagctttaattgacgggctttatgacagaattagtcttccagaagaatcaaagcaagattttaaaaatcggctatatttaaaagtcgcaaaatactttatgaaaaatcgctggttgcttatttatttaactggcgcaagtccggtttaccttgctgatttctcgaaaacgaagcacgatgaatcccttccggacggtagtagcgcgcttcgtgatggaatttctcttcgaaatagtaatgctggttataaaaacaaagaagctctttacgttgattacaattctttcgacgcttatatttctagcatctctaactatatcgaagcagggaaaatcgagagtatgcgtgaattttacaacccgattcgtttgaaaaatgcgcataccgaccaaacagtcgaaagtttagcggagcacggcgtggaatatttagaaattcgctctattgatctgaatccattagagtcgaatggtatttctaaagacgagcttgcttttattcacctatttttaattaaaggtttgctttcagaagatcgcgaattatgctccaacaaccaacaattagccgatgaaaatgaaaataatattgcgctaaatggtctcgcgcaacctgcccttaaaaattgtgataatgaagaaatatctgtcgtagaggccgggcttttagagcttaataagatgagcgatttcatccaaagcttgcgaccagaagacaccaaactccaagcaatcatcgaaaaacaaaaagaacgtctgctacaccctgaaaaaacgattgctgcacaagtgaaacaacaagtaacaaaagaaggctacgttgacttccatttaaaccaagccaaaacttacatggaagaaaccgaagctttagcctacaaattgattggcgcagaagacatggagctttccacccaaatcatttggaaagacgccatcgcgcgcggcatcaaagtcgatgtattagaccgggccgaaaacttccttcgcttccaaaaaggcgaccatgtggagtatgtaaaacaagcgagcaaaacatccaaagacaactacgtttccgttttaatgatggaaaataaagtagttactaaacttgtacttgcagaacatgatattcgcgttccatttggcgacagttttagcgaccaagcccttgcactagaagctttctccctatttgaggataaacaaattgtcgttaaaccaaaatccaccaactacgggtggggtatcagtatttttaaaaataaattcacgctggaagattaccaagaagctttaaatatcgcatttagctatgatagctccgttattatcgaagagttcattcctggcgacgaattccgcttcttagttattaacgacaaagttgaagctgtactaaaacgtgtccccgctaacgtaaccggcgacggaatccatacagtgcgcgagctggttgaagaaaagaacactgatcctttgcgcggaacagaccatttgaaaccacttgaaaaaatccgtactggtccagaagaaacgctcatgctctctatgcaaaacctttcttgggacagcatacctaaagcagaagagattatctaccttcgcgaaaactccaacgtcagcacaggtggcgacagcattgactatactgaagagatggacgattacttcaaagagatagctattcgtgcgacacaagtacttgacgccaaaatttgcggcgtagacataattgttccacgtgaaacaatcgaccgtgataagcatgctatcatcgagcttaatttcaatcccgcgatgcacatgcactgcttcccttatcaaggggagaagaaaaaaattggtgataagattttagatttcttatttgaataaaaaaatcccagctactagtttcgtagctgggattttatattactctctcaatccaatttcaccatttgaactaatcacatctttataccaataataggatgctttctttttacgcgaataatcaccggttccatcatcgtatttatccacataaataataccataacgtttggccatttcccctgtagatgcgctcactaggtcaatacaaccccaaatagtaaatccaatcaaatctacaccatcttgaattgctttatgcatttgaagaatatgttctttgaaataatcaattcgatacggatcattaatcgtcccatcgtcttccaatttatcaaaggctcctaaaccattttcaactaccataagcggaatattatagcgagtatataaatcattcagtgcaatccgaagccctacaggatctgtctgcattccccaatcatttgtttttaaataaggattttcagcccctccaataacactttttcccgaatttttataggcaggatcgttggatgcacaaagcgttaaataatagctaaaagtataaaaatcaaccgtgccttctcgcaaaacttgttcatcttctgggtcaaattcaagctcaatacccttatctttaaagaatgtttttgcataaaaaggataataccctttgacatgaacgtcgccgcagaaatggctgtgcattgcttccgtttgcttagccagcaagacatcagttggttcgcaagtacgcgggtagcgtggcatataagcaatcatgcagccaatcatgaattctgggttgatgctatggcctagttttaccgcttttgcactagcaacaaattgatgatgaagggcttgatatctcactgttgggtcatctttttgatgaaggaaatctccctccgcatgacgaatgccaagggataaataattcccaatttccattgttgcagtatttatttcattgaacgtcaaccagtgttttactaaatgtttatagcgtttaaaaatcacttcacaataatgaagatagtaatcaatcaaatcacgcgacgcccagccgttcacctcattcgttaatgctagcggaatatcaaaatgagcaatcgtcactaacggttcaatctgatattttttcagctccataaaaacatcttcataaaactgcaatccttcctcgttaggctctgcttcctttcctgtcgggaaaatacgagtccagtttatggacatccggaacactttaaatccagcttctgccattaacttaatatcctctttataatgatgataaaagtccactgcttcatgacttggataaaaagtggattcttctaattgtgcggtaattcttcttggctctgtatgcgttccaccagtgaataaatccgcacaggcaagcccttttccgcctgaattataaccaccttcaaactggttagccgcggtcgccccgccccacataaagccatctggaaacttcgtattactcattttgctcactccttaattccattacttgattccctttcgttaccgttccactatccttagcttctaccaaagcatattcattagtatttgtaattaccatcatcgttgttgtatcatatttttctgcaattttttccatatcaaacgttactaataaatctccttgttccactacatcacccgtcgcaacatgtgccgtgaagtaattaccatcaagcttcactgtatcaatgcctacatgtaataatatttcagcgccattatctgactgcatagcaatcgcatgttttgttttgaaaagcgaaatgattgtgccgttagctggagcataaagtttaccttcatttggcttaatcgcaatacttttacccataatttcatctgcaaaagtagtatcatttacttggctcatttttactaattcaccagtaactggagcttgcaaaacttctgtcccagctgctattttttctgctacaggagttgcttctactatttgctcatcaataccgaaaatataagagaaaattaaagccacgataaatgctaaggccatcgcaattaatgcataaacaaaagtatctccgacaagacctggaagtccaggaataccaccgttaccagttaagacatacgcttttacaccaaacatcattgcaaagccaccaccagcagccccaccaattaacgacgccatgaaaggacgtttatataccacatttatcccgtacattgccggttccgtgacacccattaatgcagttaaaccagttgaaaatgctaatgatttcagttttttatcttttgcccggaaaaatacaccgaaagtcgctcctgcttggctcatattggaaatataagttaacggtaaaaatttatcataaccatattttgctaaattactaataacaaatggaacaattgcatagtgcataccagtcataacgataatggccatggcaccaccaatcaagataccgccaataactccaccattatttaataaccagttaattccgccagatacaccgtctccaacaaatgtacctagtggcccaataacaacaagcgtcaaaggaacaacaataaacattgtaattaatgggacaaacaacagttttaacgaggttggaataatccggtccacccatttttccacataagacataatccaaattgcaagtaaaatcggaataacagagtaagcatacgtcactggagttactggtaacccgataaagtgtggcgttgtccccgcactaagtaaagccgttaaatccggataaagtagcgccgctccaattccaagcgcgacaaacatattcgctttaaagtaacgcgcggcacttacagcaactaaaattggcaagaagtaaaataccccgtcaccgatagctaacaagatacggtaagtttctgtatctgttgctaaccaaccaagtgaaacaaataatgccatgaaacctttgattaaacctgctcccgcaatcgcaggaagaattggtgcaaacacgcccgaaagtgcatcaaagatattcgagaaaaatccttttattcctttttgccgtgtcgttttatttgtcgtttctttgtttttccaagcaggattttctgtcactaatgcgtcaaacactttaggcacgtcatttccgataattacttggaattgattccccgcaacattcgtccccatcactttatccaaatcttttaattgtttttcatttactttcgattgatcttttaattgaaaccgtagtctggtaatgcaatgataaacttcattcacattatttttcccaccgactgcctgtaaaatttcttttgctaattgattgtagtccatgctaatcctcctaaatataatagaaaaacctgaatgaaatgcacctaaaaaagcatacaatcatccaggtattgcccgcaaatcgcggtaacaagcctattagttattttttctttttaaaagccgttcaatatgaagcgccagataaaactgttccgaatgactcatcgtaaattgataattcttttccaaaaacacaccaattttatcaatacattcgaaaatagcgcctctacttttcttcactgtttgataaagaaattcatccatttcgtcaattgtctcgccaataattacgcgttgacagaaaaacttcagatgggtcataaaacgataataattcgtactttcttcatcaaattcaatgttaaaatgatatttaataatagaaataatttcttgaattaactgcataatgtgtgtgacgtcgttcatatcactatctacttccgcattaacaaaatgtagcgctatattagaaatttctgcatcaggaagctctatttcaagcttactttccaccattttcgcagcctctttggccactgcgtattcttcctgataaaagcgtttcacttcccacgagagcggattttcgataaccacgttttcttgcaaacgttgcgtggcaaagtacagatgatccgaaagagaaatatagatgacatcactaatatctttcgtcgttttcattttgaaaagcttcacaatatcgtcagttacttctaaaaattgtattggaatttcatttacaatcattttaaacttatccattgtgtcatctttcaactcaaaaactttttcgattttcgattcattaattggatcgccaactttagaattaaagccaagcccctttcccaaaatcagcaattcctgcgcatcctcgtcaatcgcacttacaatattattatttaaaatcctctcaattctcaaacaaatcaccacctatttgaagcaaaataaaaagagcaataccacacatatcagccaaaaaaactaatatctggtattgcccgcattaccggtaacaagcctcatggatatagtaccaccatatgaaatcgctgtcaatgggttttgttaaaaccattctacccttaactattttcgattattcctcccctaggtaacagtatcttatttgtaattaaatttaaaatgaaatagattaaaacaaaggagccccaatagataaacaagttttcatatccaagcaataataccctaaagaaaattttatgaataagcaacactaagagtattaatagactatttactaaagaaataccgataattttcatcttatttcgcctccttcaatgtaaatgattcgatctgcttttgcagatatttctgggtcatgtgtgacacaaatgattgttttaccttgttttttcaatgctaaaaataattcaatgattttgtgtttgtttttatcatccaagttgcctgttggttcgtccgcaagtaataactgaaatggtttgagtaaaatgcgcacaatagcaatccgttgtttttctccaccgcttaattggtatactttttttgctaaatagctttcatccattcctacttcttctaaatgctctatcatcagcttgcgatttttcccacctgtaatggataagttttctaacactgtttcattttccatcaatagataattttggaatataaaacctaacacctctttttttagagtcataacctcttttttcgtctgatattccatctcgttaataataactttcccactatcttttgaatctaggtgtccgataacatttagcagcgtggtcttcccactaccactctcgccgacgactgcaataaattcaccagctccaatagaaagagagacnttttccaaaatcaatttatcttgtatctttttactgacattaactaattcaatcatatttttcaccttttagtatggctttaaaatctttataaatcgctttttcctttatgaaataaatggcacatagttctattatgagaataacaacgctaaaatatagggcaaccggttctttgctaagaataaaaatgaggattccagaaaaaacactcacaaacaaattgcttatactaaaccatttactacttttccaaaacgaatagccaaatacatgataaattagttgcttatataagttctcccggtaataggacagtacaagaagtaccataaaagagcataagcatagggctaagataatcgtacctatcaattgctgatatatttgccatttcaaagtagttatttcgcttgaaacttcttgataaacactccttacatgggtaatttctcttgcatttgaattactaataagtggtaagatagcgttaaaagcgtcaccattcgatttatcaataaaatatacagaagaagttacatgagcgccaatactagatgagtcaatatttcccgtatatacaatcgcaattggatccgtgatatttccagtcctaaaatccccagtattactatcataggaaaaataatcttgattattttctgcataaataatattaacacttaagtcttccttacttagcgccacagcaggcaggtctaaagctttgttataaatattcgccacttctactttttgaaaatagaagtaatcgagaaaagtgttttttatatctttctctagtcccttcttactattaggaacaataatattcaaaactttatcactgattatcgcttctttttccacgttctgaccttttatacttttaatcggatttaattttaagtaattaaaatcaatttctacgctattaccctcaggtgagtttatttcagagtcctttttcaaataagtttcatagaaaaaagtattagtttcacttcgctgaaaattattcgaatacattaaaaacatctctttcttagatgtaccttcttcataaaaagcacttaaattgttgtttagctctttatcagcttttaagttatcttgaatcccctcaggtaaaacccctacttttactttaaaaatgtcctttgtagcttcccatacatcaatattagctagtcttgtatttaatgtctgaagtgattgataagaagcaataaaagtacctataaataagcagagcagcacaaatttaataactagattgattgccaaatgctgtcttgatgattgcatacgctggtctgattttgcttgatcaattttctttattctaagtaatccaaagaaatacattggaaacagaataaaaataaataaaagtacattaaataaaagcaacttccacactatctccactaagtacgtggctagcccatttgctaaaacaatactaacaaaagttatcagaattgctaacacactaaacaaagtaaatattatagttttattgaacaaagacattaatgtaactaattcagaattcccccatatacgattaactaataaccgttgtttagagtatcttaaatagtaatatgtaaaaacaaacaaaatagcaaaacacaaaagcaaagtcataagtaacgggatattaatatatttccaccagctcacatcaacacttttcgtagttatttccccgtactgttcaaattcctttaaaaaagcctgatacgtatcctggttatctaagccgcttacataaaaagtatcacttagacccacatttttaatctgtccaaagtcataaacctttaaagaccaatacttagaaggatgataaatcacacccgattgtttttcatcgccactttcccgattcaccaaaaaccgatttttatcgggataatctccttttttaagctttatatttggtgaatactggggattagaggcataaatattcaaatcgcgttcatctaaaaatgtatactgcgctatgttaatattgttcgcttctgaaaattgctttatagaattattaacttctaaaacctgaaagtcatctttatatttaaactgcacttctgtctggtctttaaaaagaaaatcacgcgacaaagtattactaataaaagtaaaaaacattatattaccaatgacaagtgttactaatatgataatggaaagaaattttttcattaaatcatccttagtttaactataaagctaagaaacataataatttcttagctttataggaattattttgtagcccaattagctttattaccccatagcgatgatttaatccaaacacttgctagattgctctttggttcccacctacttcttactgtcgtcctgaaattagaggcacttgatctatgcatttttttataatgctgataatttgaataatgtctatcttgtccccatgtaacccagaaagtaccgcctccagctgattgcgctgcttttaatagaggtttttttcctgttgtggtctcagaaaaaatcactttttcacctgttttatttgcgctcattagtgaatctaagctagtctctccttcatttagattttgagcagctaaggcgcccatcggtgataacactgtaggcaatgctatcgctaaaacacatacttttctcttcattgtattctccccctctttccaattaatagttatattgcataaccaaataaacaggttagaatatatccttccctatgaaacctccaaatttttacttttataatattccaactattcccaatgtaacacaaaaaagtaatgtataaccaaaatgtaatgaacgactcca

SEQ ID NO: 3887 - DNA, 11112 bp, Listeria monocytogenes 4b
  misc_feature (1)..(end): n can be any nucleotide: a,g,c or t/u
atcattattgtgaccaattgctttattacaaacttttggattatcggaagcgtttcgaatgttgctggattcgctgaggcaaataattggctgttattaagtattcaattggtatatattattttggtgatgctcattggcggaaatatttatcgaaagacagatttatataaactaaactagggagaatatcgatgaattatataaaagttaatcatttaacaaaagtaatcaacaacaacactgtactagatgatattaattttgaattaaagcaaggtgggatttattcgttcataggtcataatggctctggaaaaacgatgctttttagggcgttatgcggttttattgcgccaacaagtggtgaagttacaattaatggcattagtattagcaaaactagatctttcccagaaaagaccggaattattattgaaacgccaggctttttagcaaattatactggttataaaaatttggaatacttagcttctattagaaatcaaataggtgaaaaggaaatacttgctgcgttagaacaagttggactttctggaaaagagaacttgaaagtgaaaaaatattcgcttggaatgagacaacggcttggtattgctcaagctattatggaagacccagatttattaatatttgacgaaccaacaaattcgttagataaagctggcagtcagagttttattgacttgattttagacttaaaagaaaaaggaaaaacgattttgttagcaagccatcatattgctgatattgatggtatatcagatgaaatatttgaaatggaagcaggtcagataataaataggagaaaagtatgaaaaaaatacttggcggaatcttaattatttttgtaataggcctgtttgcttggcgcgtatatgatgtaaaagctaattctttttcatatgaaaataaggcacatgctgaacaggaaaaatttcaacttggaagctcaacaatcagtgctggaaaagcatttgttgtaagtgatgcagacttaaataaatatgtgacaaaagattattttaagcaggaaaataagactcttttgctcgttcaattagaatctacagaaaaagatataagaatttctgattttcagttagggtataaagaatttgtaacgttgtcagatacttcggcagcaagttatgaatttgaagatggggtgtataaaatggtgttaggttttaatatacctaaagaattactagcaactaacaagacattcacattagttactccgagtaaatattggaagaacggagcaagggatgttgtggaaatcagtttataaaaagtagctttattcaaaccgacaaagtcatttggctttgtcggtttttttgtgcctgaaataaaaattaacttgaaaaatatcacattttcgcataaccttaaagtagacatatctttttaccttctagaccgaaatcaaggaggtaggccaagtggtacaatttgatgctcgaaatatggcgttgctcgaatcactcgttgtggcgaatgtatatcttgcacccgagaaattacaagaagaactaggaatttccaaacgaacacttcaatatgatgtggaaaaaattaataaagaattagataatataggactcgatggtattcaatctgttcgtggacaagggtattatttattagaagatgaaaaatcgacaattaaagaaatccttggaaatagggaagcgagccacaaagtcttttcagcaagtgagcgtcgcatccgtattttattttttctgctcgtaacagatgcgcgagtaatcattgatacgattaatgaatgcaatgaagtcagtcgtaatacaagtttgcaggacattaaacaattaaaattagcgctaaaacagtttaatttagaacttgcgtatgaccgtaaaaatggcaatatggttctcggtgatgagcgcagtattcgccaattttttattcactattgtatgaataacgaagaaatcgcaaccgcagaccagttgctcgatttaatgaaaattaatccgatgataaaaaatcaggagttatttcacaaattagatacgattttcgaaattttagcagtaacggagaaaaaaatcggaattcgttatactgacgaggtccttgagcgcattggtattatgattttcttctttaaagaacgaatgaagcgtaattgctatttaaatgaacaagaagagcatgaagtagaatcttttgagattgcgcaggaaatttatcagcaattgcagcaaagtgagaattttaaaatcaatcatgcggaaatcacttatttaggtaaacttttgcttggggcgagtcgtttgaatgatgatgcggctgctgaaggaaaattagatctcatcgttgaaaaaatcatcgccgaatttgaacgtcttgcttgcgtgaattttgaagaccatcgcaatttgaaaaaagatttattgcttcatttacaaccagcctactatcggcttaaattccaaattgagtggattaacccgctaaggacagacattaaacaaagttacagtgatgtgtacgagattacgaaaaaatcactcgaaccgctagaagatttacttggtgaaacaattccagaggatgaaatagcgtacgtaacaatcttgttcggtggctatctttcacgcaaaaataatactttagttgaacgaaaaaaactcttaatcgtttgctccaaaggtgtcggaacgtcgcggatgattgaacggcaattatcgcaattacttggtgagcgagtagagatattagaaccaatttccatccgtgaatttgaaaaagggttatacgcaccagactttattgtgtcgactttgccaattatggaaccaaaagcaccagtttttatcgttagtccaattttgacagaagcgcagaaacaacaactgatgaaggcgattgccccgcacattttgcaaaaggactcggatgcgcgcatgttgtcttctgtgcttgatgtagtagatcaatatgccaaagtggaagaccgcgagaaattggcggcaaaactgaaatcggtattgttccaagtgcaatcagacagccaactagaaaaatctccaacactcgaagaacttttaccgaaagaacgaattacttttaaagaaagtgtggcggactggcgtgaagctatcctagttgcctcgaaatcgctgcaacaagaaggctacatttcgagaaattatcagcatgcgatgattgaaaatattgagaaactcggaccatacatcgttattgcgccagggattgcactgccacatgcgtctgtggatgacggggcataccgagtcggaatgagcttactgcgcttaaatcagccagtatcattttcaagtaaagcgaaagatcaagtgaagttaattattgtgctcgcttccattgactcctacacacatattaatgcgctgagccaactcactaatttaatcatgaaacatcacttgctagagcagattgaacaagcgacatcagcagcggaaattgccgcaatgttaacgatacaataagcaagaaagccagtggggcaccaagatgccgcgctggctttttgtatgctcgctaacaacaaaatgtaacagtctattttttgcactttcgaaaagaaaggaattgggcttttttaaacagttgcgctacagctataataagagtgtaagttattgatagcgctatcaattagttagaagggatgaagagatatgtcttttttggataaagagcttgtgaatctgcatggatcagctaagaatgctgacgaagctatcgtgcaagcaggagaattattagttaatgcaggttatgtgagcgagcagtacgtagaaaaaatggtggaatcttatcatgaaaatggtgcgtactttgtcattgcacctcaaatagccattccgcacgcaagaccaactgatggtgtggaaaactctgcagtatcactagtcgtactaaaagaaggcgtgaatttcggacacgccgcgaatgatcccgtacgattagtattcggccttgcagcaacttcaagtgaggcacatttgaaagtcattcaaaaaatcgtctccttgcttagtaacaacgataatattgaaaaattgattcattcagaagattaccaagcaattggagaattagtggagggataacgatgaaaattttagcagtatgtggacttgggcaaggaacaagcttaattttacgaatgaatgtagagacagttttacgcgacatgggagtagatgcagacgtggagcacattgatgtatcagctgcgcgctcgatgaatgtggatattattgtaacgagccaagagttagcagaaacacttggaacagatacaagcgccaaagtagtcatcgtcaacaactattttgacaacgcagaaattaaaacggcattatctgaagcaattaatagttaaataagacaaaaaaaggtgggaaaaaaatggagattattacgtggattgccaataacttttttggaaccccagccatacttttaggttttatcgtacttctcgggttacttttacagaagaaaaatttaagccaagtgattagcggaacgttcaaagccattattggattcttaattattaacgctggtgcggctgttattactggttcccttgggatttttgaaccaatgtggaaagaagtattcggacttgaaacaccgccacttgcaggctttttaggacaagaagcctttaatgcaaaatttggtagtgcggtaacacttgcgatgacactcggatttttagtcaacgtattattagcacgatttacaccatttaagtacatttatttaactggtcatatgatgttctggacaacgacgatttttgcaggaatcactgtgcaagctgtcggcggggatattccgttctggggtcttgtactcttcttagcagtaattatgggtctttactggacattacaaccagcgattacacaaccattcttacgtaaaattactggaaatgacaacgtcgcgttaggacatacttcatccagtgtagcgattctatccgctttgctagggaaagtatttgggaataagaaaaacgatgcagaacatattaatttaccgaaaaaattagagttcctacgtgactctaacgttattacagctcttacaatggggattctgttcgtagttggtgcagtgattctgatggtgaagaaaacaccgggagcagaaaaattaatcgcagaagctggaaatcaaagcttcatcgtatactccatcgttcagtcctttacgtttgccgctggtatcgccatcgttcttgtaggtgtgcggatgtttatcggtgaaatcgtaccggccttcaatggtattgcaacaaaacttgtaccgggtgcgaaacctgcactagatgcgccaatcgtttatccatatgcaccaaactccgtaattatcggtttcgtaggtgcgttcattggagcgattatctggttagtagtacttggaaatacagttggctacgtgtttgtgccaacaatgatcgttcttttcttccacggggcagttgctggtgtattcggtaactcaactggtggggtgagaggagccttgataggtggatttttaacggctacggttgttgcttggggacaatatattatggttaccttctttatcaatacgactgttccagatacagcaatgtgggcagccgactcagatatgtttatcctcggaccaattgtcagcatgttagcgaagttattcttttaagtaaaatctaaacctcttccttgtctagcattcaagaggaagaggttttttgaaaggaagttttaaaaaatgagttttattcgtactttttatggagatattgcccctgaacaactgggcttcacttattcacacgagcacatcgtttgtgtaccagcttactggcaagagcgagatgccgatgatttacttttggatgataaagaaaaatcacaacttgatgtacaagatttcgccgatttaggaggcaaaacaattgtcgatgcaaccgcggttgattacggcagacgcgtcttagatgtggcgcaaatttccaaagaaacaggcatccaaatcgttggaacagctggctttaacaaaagtttcttatgggacgggaagattaaaccagaactgaaaccaatcatcggggattttgaaacctactatgaatggattgaaaatactactacagacaaactaacggaattcgttgtaaatgaagtcgaaaatgggcttgaaggaacgccgtataaggctggtcaggtgaaatttggcactggctacaatatgattacacctttagaagaaaagacaatacgtgcggttgcaagagcacatcacgagacaaaagcaccaattcattctcacacagaagcgggaacgatggctttagaacaaatcgagattttaaaacaagaaaatatcccgttagaatacctttctattggtcatatggaccgcaacctagatccgtattatcacaagcaagttgccaaaacaggcgcattcatgtcatttgatggcatcgcaaaaatcaaatacgcaccagaaagcgctcggattgcagcgattctatatctagtttcggaaggctttgaagatcaaattttagttagtggtgatacagcacgcaaaacttattataaacattatggtcacggaccaggacttgaatatatcgccaaaaaatgggtgccacgctttattgatgaagcaaacgaaaaaggctttgacggagaaaaattagttaaaaaattcttcgtggataacccagcaagatgttttacttttaaaaaataggaggcgaaatctgtgttatatgcagatgaaaattcatttgatattggcgcgaaaatcacgaaaacaaaaccagtccttttgccaataggagcagtcgaagcgcatgggccgcatttgccactagggacagacaatattttagcgtcagaatattcagcgaaaatagcggcggaaacagatggattcgtgcttccggttttgccatacggccaagtttggagtttgcaagatttccctggaagtttaacactatcaaatgaaacggtaacgaaagtagttgtagagattggtgaaagtctatataaacaaggattccgtctgtttgtcccagtgagtggacatcttggcaatatggctgcgctaaaagatgcagctcgcgaactatatgcaaagtatcctgatatggttatcttgcacattttttacccgaatatccaaaaattagcaatggacgtgcgcgaaggaaaagctaaccatcatacgtatattcatgcctgtgaaatcgaaacatctctcatgctctacttgtccccagaaaatgccgatatgagccgcgctatagatgatccgccaattttaccaatcgatgcggatttcaccccaacaccgtggcaaaacttcacgaagacagcggttctgggagaagcaactttggcaacagcagaaaaaggcgaatacttgattgaaaagacgttaaaaacatgtgtggagttgataaaacttgaacaagaaaaaattcgaaaatctaccgaaatggaataattttgcgctatttaattttttagcgaaagataaggaaaatagcctggaagtcatggaggcggcgcgcggttttgccgttccgggaatcgttgcaacgaactacgaaacagcagaagaagccgcaaatgtggtgaaagaattacaaacaacagcccccgtcattagtgttggtcttggtggcggtggagactggcaaaactggcgtgatgtgcttcatattgctcgtctggctccaaacagtcatattaaccagccaatcgaaaccgcgggattaacaaatgacttacttccggaaacatacactaatgcactcgttcgtccaaccgggaaaatcggcatcgtcaaactatcttccggagacgaaattaccgctgaggaagctgtcgattattgtctatccgccaacatcccgtccatcaaatttatgagcattgaaggcacgaaatatttagatgaactagtttacttaacaaaaattgcggccgataaaggcatttacggtattgagccagcgggaggaattggagctgacaatattcttgaaataacaaccgccatcaagtccaccggaattcccttttatatgccgcatatttttggaaaaacaattgacaaagcaactggccgaacgaaaccggaagaaatcgagaaaatttttgcagctttggaggggaattaaatgattaataactatatcgatattacagttcgtttattagaaaacattctcgataatgaagctgattatgtaaaagaagcaggagcgaaggtagccgagtctattgaaaacgacggggtaatccatttatttggttgcggtcactcgcatattttaacagaggaagtattttaccgcgcaggtggactggctgcgattcatccgattttgcatgaaccacttatgcttcacgaaggagctgcggcgtcatctgtactggaacgaaaaaatgattatgcgaaaacatttatggcagaggaagatatccgtcctggcgatatcatgattgtgctatcgacgtccggacgaaaccctgtaccaattgatgttgctgaaattgcccgtgaaaaaggtgcatttgtcatcgtcattacttcgctccaatactccgctagccaaaaatcccgccacacatccggaaaacgtttatctgatgcaggggacattgtaattgataacggtgctgtcaaaggtgatgccgtcttaaaatcggcaaacttcgatattgcatttgccccaacatcgacggtaacgggcgcagtcatcttgcaatctatttttgcagaagcaatcgaaacaatggtaaacgacaacttcacaccgccagtatttattagtggaaatgtcgaaaatgccgatgcacataatcaagcacttgttgataaatataatgagcgaattccgcttcttggaatgaatttataagaaagaaaagtctaggttagcacctagacttttttactatgttagagtatttctatagattgcgatataattaaactatataaaaatgataaaggagtgcggccgatggattcagcaaatgtatttgatagcgaacaagcaacgaaattattaatgaagaactatgaattagtaaaaacgagtggcgttagttttattgataaacgaattcgatttctaattgctcgtctttttgcggggaataatgaagtggttaatccagaggaatttagtgaaataaataaagggattgagggaccgctaggcaagttcactgcagtgaacggaaatgttcgcgcacccttggtaggattgctcatgccgaacggataatgccagccgagagagcgtccggcaagtaattgctaattataatacattgatccaagcgggattccagcgcccagaatacacttattttgcagcatatttattactagaatcagaaaatcccaaaaagccagcccaaaaagcgaaaactattcaccaccttttcaaaaaagcccatccatttttaactaaaagtgaagatgtgacaacagctgttttcttagcaaatcttcctgaagaaaataccacgaaattggctgaaataacagagtactattttcaagagttcgccgcgaaaggtttccgcaaaaatgatagcttacaatttttagcaacaacagggacacttttgtacggtgaaaaagatagcaaattcattcgaagagtagataatattgtagaagaactacgacaaaaagggataaaagtaaaaccgctacattactcaagtattgggattttagcttttgtcatggacgcgcgaaaaatcgattcagggttagtgaacttaattgatgaattacagcaacaaccaggcttgcgtttcggacgagaattcgttacagctctagcaataagcctatatacggaaaaacaatcaggtcaaatgagtaaggaacaattagaagggttaatggtcaatgtgcatatattgattgcaatggaacaagcagctgcggtgagtgcagctgcagcagcgagtgcggcagccgcatctagttaatacaaaaaaactggtaagccataacggctaccagtttttttatgatttaaggactaacataatagtcattacttttcttaggcggattggatgaacttaaaacgtaatctttcaaaaatgaattcggtgcagaatcccataaagccataccatcagattttggaggggcagttccggcgaagaaatacatgttatttaatcccatcgtatctgccattttttccttatccgcttggttgtacttatcataagattcatcggtcattaaatccatcattgccttatcgtagccactattataaaaagtttcgtaatcaaattgattaaaattaagcaagttttcatccgtagagccttgcgcttttgcccaagcttccatatctaacttttgagattgatacgtgaagtttttgtttttggcactataagtaatattgccatatttatgcgggaaaacagaaagagcattggttacgatatcggtaatttctttgccatctgtgcttttcgcagagcggatattttgcgtatgaatatggccacttagagaaaaatccatagagccttccgtaagcgcatcaattacttgttgattataattaatagtataacctttttgaataacatcattatgatcagttaaattatgatgcaaaacagggacaagtttagcgccgtttttctttgcaagcgcactgctttcttttatccaatctaatgttccggctgttagtccgccttccgttgtgggatttccttgctgcatatttgttttataaatagcggtatctaacattaacagccatactttggaagaaggagctgctaaataactcagcgaaaactcatcacttgaaatagcatctttatatccaaaatcaccataaattttactgaaatcagttggtgatatagtgtcggttggtaactgcttatctttttcaaatttgcgggcccaagggttgttaatgtcatgattacccggaacaacaaaaacctgcgtccc

SEQ ID NO: 3888 - DNA, 8307 bp, Listeria monocytogenes 4b
  misc_feature (1)..(end): n can be any nucleotide: a,g,c or t/u
gaaccttgttataacgcagtaaaagccgttgatagcggtaaaggttgtctatatatgtacggaaattatgctggcgatgtgatgaactttgatatgggcgctgaaatggctgcggacgacggtattcgcgttgaaacagtgcttgtaacagatgatatttactctgctgaaaatgtagaagatcgtcgtggtgtggctggtgacttaattgtatttaaagcagcggcatctgcagcagcaaaaggacttgacctagatgcggtgaaacaagctgctgaaaaagctaatgcaaatacgttctcgatgggtgttgcgctttcttcttctacccttcctgtaactggtaaagctattttcgaaatgaaagaaggcgaaatggaagttggtatgggaatccacggtgaaccaggaatcaaacgcacttccatcgaaccagctgataaagtggttgatcaaattatgggctatcttatagaagaaatgaaattaactgcggatgaagaagtgcatgtacttattaatggacttggcggtttaccagtgatggatcaatatatttgttatcgccgcgtcgatgaaattttgaaagaaaaaggcgtgcatattcataacccacttgttgggaactacgcgacttcgatggatatgattggtatgtcgattacactggttcgtttagacgatgaactgaaagatcttttagatacaccgtgcgacacaccatatttcaaagtggactaaattactactggaggaataaaaatgagcgaattagttatggatagcgcttttttcggccacgttttacaggacatgggagcgctaattgaaaaagaacgtgattacttaaccggactggactcggatattggagacggcgaccacggaatcaatcttagtattggctttcgtgaagtgaataaacaattagacgaattactcactgcttctcccgatattgcaacgttgcttaaaaaatccggaatgattctccttggaaaagttggtggcgcatctggcccgctttatggcagtttctttatgaaatgtggcgctgatgttcctgggaaaacggaggttaacttcgacgagctttgcggcatgattataaatggggccgctgcggttcaacatcgcggaaaagccgaacttggtgataaaacgatgatggacgccttcttgcctggcgtggaagtgcttcaaaatcgagatacaaatgcagctccaatcgaaactttttccgcatttgtagatgctatgcatgctggcgctcagtccactatcccacttattgctaagaaaggtcgcgcactaagacttggcgaacgagcaattggtcaccttgatcctggctctgaatcgtcttggatgttaatgaatgtcattttagaaaatttaaaaaaggcggtctgatttatgcgtaaacccttagttggaattaatatgaaaaactatattaacactcgggctcagacatctgaatggttagaagcgactatccctcttcttaaaaatttttctgatgtggatacgtttatctttccttctatgggcacactcgaaacgaccgccaaccttttagcggggacattatttggctttggtccacaaaatatggcgccggagaaatccggcccgctaactggtgaattttcggtggaatctatcattgacttaaacgcgaactatgtcgaaattggtcacgcagaacgcaaaaacctttttcatgagaaaactagtgagatagcgaagaagattaaacttgcattggacgaaaaaatcactccggttgtctgtgtgggtgaagaagtccgtgcgaatgatacaaatgaattaaaaaatgcgctaaaaaaacaaatcgaagcgctgtttcagacaattaatttagcacagtgggaaaatgttgttctggcttatgaaccggagtgggcaattggaaaggcgtcttcagctgagacaaactacatcgaaagcgcgcatcaagcgctgcgtgaaattattcgcgaactaggcggcgatgaaacgctcgtaagaattatttacggtggctcggtcagcaaagaaaacgccgcagaaattgtccgtcaaaaaaatgtcgatggtttattcgtcggaagatttggccataaaccgcaaaattttgccgacattgtttctattgttagcaaaacgaaaggatgagttagtatgaaaatcgcaattggttgtgacgaaatgggttacgaactaaaacaaaccctcatcacacgtttaaaggagaaaaatattgagtttactgatttcggcagttttgaaaacgaaaaagtactttatccaagtattgccgaaaaagtagcactagaagttaaaaacaacgattatgaccgagggatccttatttgcggtacaggtattggaatggccattacagcaaacaaaattcacggcattcgcgcagcacaaattcatgattcttattcagcagaacgcgcaagaaaaagtaacgacgcacatattatgaccatgggagctctagtaatcgggccatcccttgccgtatctctacttgatacatggctggatagcgacttttcgggcggacgctcccaagcaaaagtagatttaatggaagaaatcgaccaaaaaaatagataaaaaatttattggaggtaatgaaaaatgacttttaaaggttttgataaagattttaacattacagacaaagtagccgtggtaactggggcagcaagcgggattggtaaagcaatggcagaacttttttccgaaaaaggcgcttatgttgtcttgcttgatattaaagaagatgtaaaagatgtcgcagcaaaaatcaatccatcaagaacgctagcacttcaagtcgatattacgaagaaagaaaacatcgaaaaagtcgttgccgaaatcaaaaaagtctatccaaaaatcgatattttagccaattcagctggtgtcgcacttctcgaaaaagcagaagatttaccagaagagtactgggataaaacaatggaactgaacttaaaaggttcgttcctaatggcgcaaattatcggtcgcgaaatgattgcaactggcggcggtaaaatcgttaatatggcctctcaagcttctgttattgcacttgataaacacgttgcctactgtgcgagtaaagcagcgattgtttctatgacacaagtgctagcaatggaatgggcgccttacaacattaatgtcaatgcgatttccccaaccgttatcttgacggaactaggcaaaaaagcttgggcaggtcaagtcggcgaagacatgaaaaaattaattccagccggtagatttggttatccagaagaagttgccgcatgcgccctctttttagtaagtgacgcagcgagccttattactggggaaaacctaattatcgacggtggttatacgattaaataaagtattcagctttaaagttcagctgagagaatggagcgagtaaataatgaaatttttcttggacacagcaagcgtatcggaaataaaacgaattagcgaacttggtttagtggacggtgtgacaaccaatccaaccatcatcgcaaaagaagggcgaccatttgaagaagtaatcaaagaaatttgttctatcgtagaaggtccagttagcgcagaagttatcggcctcgaagcagacaaaatggtagaagaagctcgaattctagcaaaatgggcgccaaatgtagtagtaaaaattcctatgacggaagaaggtttaaaagcagtccataccctcacagctgaaggcattaaaacaaatgttacgcttattttcactgtttcccaaggattaatggctgcaaaagctggcgcgacttatattagcccgttcttaggaaggctagatgatattggtacagacggaatgattttaattaaaaacttgaaaaaagtgcttgataattatggtctaaaagcagaaatcatttcagcaagtatccgccatatcgggcatttagaagaagccgctgaagccggagcacatatcgcgactatcccaggaagccttttcccgaaactttggtctcatcctttgactgataaaggtattgaaggatttttaaaagattgggaagcgttcagtcagaaagaaggcaattaatatgagcagaattgatgaacaaatggttaactcgattcgcgtattatcaatggatatgattgaaaaagcgaactccggccatcccggtttgccgatgggagccgcaccaatggctttctcgctttggaaaaatcatttaaaattcaatccagaacacccaacttggtttaaccgcgatcgcttcgttttgtcagctggtcacggttcggcaatgctttatagtttgctacatctatttggttatgatttaccaatgagcgagctgaaaaacttccgccaaactggtagtaaaacgcccggtcatcctgaattcggtcatacggttggtgtcgatgcaactaccggtccacttggtcaaggtttcgcaatgggagttgggatggcgatggccgaggctcaccttggcgccaaatttaaccaacctgaattcccggttgttgaccataatacctacgtgctatgcggagacggctgtttgatggaaggcatttcctacgaagccgcatcccttgctggtcatttaaaactgggaaaattagttgttttatatgattcgaatgatatctcactggatggcgatttaaacgagtctttttcagaagacatcgaactcagattccgagcagccggttggcaaacgctacgtgtggacgacggaaatgacttagatgcgcttgatgcagcaatccatctcgcaaaaaccgagaaatcccgccctactttaatcgaagtgaaaacggtcatcggttacggtagccctggtaaagccggaaaatcggcggcacacggctccccacttggcgaaaaagaactcaaacttgcaaaagaagcttaggattggcaaatgccaccttttgaattaccaaaaactgtcgaaaatcagaaagaattttatcattctaaaggtcgcgcgagtgaaagcagctggctccggacattcaatgcttacaaacaaaaatttccagcactcgcagaaagtttgcaacaattaatggatgataatttggatacggattgggatgcagaacttcctgtcttcgatgaaaatgcggacaaagccgttgcaacccgtgaagtatcaggaattgttctacaagaattggagaaaaaactgcctaacctatttggtggcgcggccgatttggcctcctccaataaaacccatttaaaagctagcgaacggtttgctccaggtaactatgccgccaaaaatatctcattcggcgtccgcgagttcgcaatgggagcagcagtcaacggaatgacgcttcacggcggtgttcaagctttcggcgcaaccttcttcgtattctcggattatctacgttccgcgattcgttcagcagctttaatgggcattccatccactttcatcatgacccatgattccatcgcagtcggtgaagacggtccaacgcacgaaccaatcgagcatctcgcatccttccgcgccatgccgggacttcacgtcatccgaccagctgacggcaacgaaaccgttgaagcataccgctatgcctttactcaaaaagaacaaccaaccatgctcgttcttagccgccaaaacctgccaattttaccaaatagcgcagcaaaagcgcaaaccggacttgcaaaaggtgcttacatcttagccgattccccgcttgataaactagatattatcttactcgcttctggatccgaagtacacctaatgacagctgtcagagataatctcgctaaaaaaggcttcggagcacgcgtagtcagcatgccaagctttgatttattcgacaaacaaagccccgaatataaagagtccgttttaccaaaagcagtgaaaaatcgcttcgccgcagaaatgggcgcatcatacggctggcacaaatacctcggcgacacaggccaaatcctcgcgattgattcgtttggtatgtctggcccgggagatgagctagcaagacgatttggctttactgtagagaacttgacggagcttgcgttgaagcagttgtaggtatggaataaactttttaacagtaaccaatcaagtactcgggcataaaaaagcaggcattctctatttagaaagaagagaatgcctgtatttatttgactagaaatcaatttcccactttactcagcgccattaagcttagataaatcagcaagtagcggtttcccatctgcatccaaaagtggtgacattccacccgcataaccagacaaatggtaaacatattgcacaccggtttctttatcaacccaaatttccataatgttgagttttccttgggtataaattttttcaaatctttcttccattgttttccgcctcctgttttaaggttgcacgctttattccaccctaaatcaatttaatttccgaatcaaaatattgctcaataaaatgtactttctctctaatttcctctatttaaagtatcctgttttaaccaacttaaagcctacttctataaatttaaatttttaatatcaacagtttctggcattcacttaattgtaggcaattcctttttcaaagagcacatagaatttacacctaattccatagactaagaaactatttccccaataaataatctagctcttcatctgtccattgttgatgaatcaatccctttatctcatcagataatcgtaaaacctctttccattctggcgttgttctcaatgcttttaccacagaattcctccatcaagttcaaaaagtttagtttgcagctgcttgcttagtaaagaaagctctctatcaattatgtcattatccaccaacaattccctagtatatggactcaaagcagctggataatcaattgctaactcttcaaatatttcatattcaatttcttcgtcggataaattaattgtatgcaatcctaacatacatagcgaagaaaggtaatattcaaaagactgttctgttgttaattttttcaattgtttcacctcatttattttttaatattatagtcaatggatttgtgtggtgtgcgtgtattatgaatcgtcaactatgtaatctcgtatgttctttcttagcatttctaacaaaaaagctataacaactataaaacacttgaaaatgaaggtctctatttcttcaatttagaattgactttgtatattttcccaaatttctattataagttttccatttattctagctgttcctaataagtcttctgaagtcctaaattcttgtgtttctccatcggatactttcgttaagtaatgtccttcccgatttttacttaaccaatattcctcatttttgtagtaaaaattatattcctcaccatatgctaaactatcagccatttgttcatattccatgcttctttccttctttcagaaacaggttctctatttattaaaaaagcacattactttaaactccctctatccgttcaatcactccagtagttcatcctgtctcggttttcgaacaagtgtaatatatttttcctctactgcgcagaatttcgcataatttatttttgcttgttttaacgaaatattattagctcctataatttcatccggatactcttgagctaccacatcatattcccagtagcatacttcgcaaatatcgtaattagcttcaatcgtataattttcacaaactggacactgtttcaaagttattcctcctcatcatttcggataatataaatcaatttgtttctcccaatattttaatccagttaggtttgaaatatgtagatatagatccatactcgtttataatcccaaattcatttgttttagaatcatacctaaaatataataccctactaaatgttcataaccttccaataatccacttgttgtgaaaaaccctacatccaataccttatccattaatatttttccaaaaagctcataattaaatttgttaaagtgctcaaatcatttcatttttctattccgtactttctaaaaaataaggttatcaaggatctacttttacgacgctaattgagatgtggagtgttttttacttatttactttttctataacatctatattgaatctatcaacatttaatgcaacaaattgattttccagaataccacaaaatcagaaatatcctcatctgctaaatcaatctctatccctgaatctattttcttactagaaggatgaaaaacgcctctgataaagtatgcaa

SEQ ID NO: 3889 - DNA, 16132 bp, Listeria monocytogenes 4b
  misc_feature (1)..(end): n can be any nucleotide: a,g,c or t/u
gatgactcaatgatgtcagatccgcgatacgagcagcagagatttattgagaagagctgaatatgccagaagcagagcgaatgtacatcacattacaacttttaacttccaatgtacttccgaaacaatatttgaaatcggaggaaacgcacaagttaagactggcgctggaacaagttctaagcgaatttgagaaaaaggcttgtattcaactagtagacaaagaatcgttacttgaaaaattatttgcacacattaaacctgcgtattatcgaattaagtatcatcttacaacagattacagcattttagacaagattgatcaagaattccaagccgtgcattacatcgtgaaagagtcgttagcaccattagaacgttttattggtagcaaagttcctgaaaatgaaagtatatttattacccttttcattggagggcatttaatcgaatccacagagaaattacaaacgagactaaaagcagttgtggtttgtccgaacggattgtcgatttcgagattgatggaaaaaacattacgaagcctttttccggaaatatttttctatcaagcgatgtcgattcgagaatttgaacaaacaaagttaggttatgacattgtattttccgcagtgccactttcgaccgacaagaaatttttccttatcaaccaactgatggatgggaaagaacgcctggagcttagacgccgggtgatgcgagcggtttacttagtggatgaggtgaatatcagcgtcgatcaattaatgaaaactatttccaaatttgctgatattaaagatgctgcccgtcttgaaaaagtgctagcagattatttaatgccagttccagaagaaaacacatccaaacacgaaggcaaaagcacactcgcagatctactcgaagtaacgcgaatcacacgtaagaaatcagtgaaagattggcatgaggcaatttatcatgcggctttaccgttactttcggcgggagtggtggaaccagcctacgtggaagaaatgaaacggcaatatccggcaccgattatgaacatcattctccgtaatacaatagctatccctcatgctgaaacggaaaaaggagtaaatagcctcggaatgagcttgctttatctagaagaaggcctgccacttgaaggcggtaaagagctacattttatcgttgtcattgcagccatagataaaaacgctcacttcacagctttactacaattgatggaattatcggagaacaaaaaagaactgaaaaaacttgcggatgctgcgaacacagaagaaatgcaccaaataattaaaaacttcacggacttggaaacaaaaaagacaatgtagagaagtcagaaagaattacaggaggatttcgtaatggatttagtacaatttttgaaaaaaggaatggtttgggttcaatcggatatcgagaaacaagaggacctattccaaatggtcgcagaaagtggaaagtctgaaggatatgtaacggatgactttttaacaagactaacagaccgtgaacaaacctttccaacggggctaaaattagatggatacggcgtggcattaccgcacacggatccagaatgcgttacggaacaatttatcgccgtaatcactgtgaaagatggcattccatttaaattaatggaagatgctggtcaaacggttgaagcgaatttgattttcgtactcggactaaatgaacctcacagccagctcgcggtacttcagcaattgatggggacgattcaggataaagacaatgtagccgcattactcagagcgaaagatgaagacgaagtaaaacaaattttagaaactattaccgtttaaaaaaaacaggaaaattagccgcgggaaatcgcagcaattaattaggaggaatttatcatgggacaatttaaaattttggtagcttgtggagcaggaattgcaacatcaacagtagtaacggacagagtagaacgtttggtaaaagaaaacaacgtggatgcagaagtaaaacaaattaaaatttcagaagcagcatctatgcaagacggagcggatttaatcgtatcaacaactattttaccaacaacttacaaaatcccagcgattattgcaacttcttacatcactggtatgggtatggaagaattagacgaagaaatacttgcgcaccttaaataaaggctgcgcaagggagtttagaaatcatcattaaacagagaaaaaaggaggaaatattaaatggatacacttctgtcaggagtacagtatgttttaaacttggggcctacagttattttgcctattatgattttctttattgcattaattttccgagtaccagcaaagaaagcgcttcgttcagcgattacgattggtatcgggtttgtaggtattaaccttgttattagtttactatctagtaacttaggtccggcagcgcaacaaatggttgagcgttttggactgaatttaacaattattgatgcaggttggccagcagcagccgcggcttcatgggcttctccagttgcagcaattttaattccaatctgtttggtagttaacttagcacttattttcttcaaagttacgaaaacacttgatattgatatttggaactactggcatttcatcgcagcaggtgcaactggttatatcgtaactggtggtaactggtggttcgcgattctttgtgcgatcatctatgaagttgctgttctttggatggcagacagaacacaacctatggtagaagaattttacggcttaaaagggatctccttaccaacaggttctacagcagcattcggtttcatcggtattccggttggttggctaatcgctaaaatccctggtattaaaaacatccatgttgacccagaaactattcaaaaacgttttggtattttcggggaaccaatgatgatgggtcttattctaggtattgcaatcggtattcttgcaggctatgacgttggcgcagttgcacaacttggtatgtccatgggtgcggtaatgttcttaatgcctcgtatggttaaaattttaatggaaggtttaattccaatttcagaatccgctcgtgaattcatgaaatctcgtttcaaaggccgcgaactttatatcgggcttgatgcagcactttcaatcggtcacccagcgaatatttctactggtttaatccttgttccaatcactcttttcttagctgttatcattcctggtaacaaagtacttccttttggtgacttggcaactattccattctacgtatcattcgtagtagcatctcgtaaaggtaacattcttcactctgttttagctggaactgtagttattgcactagcgcttcttatggcaactgacttcggtcttgttcatacagaaatgatgaaaggtgtttacgaattccctaaaggagcaacacaagttagtacacttgatatgggtggtaacttctttaactgggttattcttaaattctctcaagcttgggcagctattttctaagttttgtcttaatgatatagaagaggtgatagtaacatgagagcagctgtgttatacgagaataatgtaataaaagcagaacaaattgatgaagcgacttgtgggaaagatcaagttcgtgtcgaagtaaaagcagtcggaatatgcggatcagatattcataaaatgcagactcgctggaaatacccactgcctgctgtaatgggacatgaattcgcaggtgtagttacggaaattggtagcgaagtaacaaacgtagctattggtgaccgtgttgcagggattccgctcgagccttgtatggaatgtaattattgtaaagcgggcgactttgcattatgtgacaactaccggatggtgggatcacattttcacggcggatttgctgaaaatgtcgtcatgaaagccgacaatgtcatttctatcggcgaccttgattttgaagaaggtgcgatgattgaaccacttgctgtatcaatgcacggagtacttggtattcagccgagacttggcgatacggtgattgtcttcggaattggaaccatcggaatcttggttgtacaatgcttacttcttgcgggagtaaaagatattatcgcggttgatatcagtgataaaaagttagcagacgcgcgggaattcggttgtaaatacaccattaatccaaaaaatgaagacttaaaagaacgcgtttttgcttatacaaatggtcttggggcagatatagcgctcgagtgtgctggttccaaaataacgcaagaacaatgtcttcttgtaacaaagaaaaaaggtaaagttggttttctaggaatagcttacgcagatgtgcttttacacgaggaagcttttgaaaatatttttagacgtgaacttacgctgaaaggtttttggaattcttactcggcaccatttccaggtgaggagtggcgtacgtcgattgaattcgtgaaacaaggtcgaattaaactgaaaccactaatttcgcatcgttataagctagaagaaacgaaagaagcttttgatatgattctttccagagagcatgattataacaaagtgatgatattgccgcagaaaggtgacgattaatttgaaagcagtagtaaaaacaaatcccggatatgatcaaatggagctaagagatgtagaagaaccacaggtctatggcgacaaagtaaaaatcaaagtagcattcactggtatttgcggatcagacatccatacgtttaaaggtgaatacaaaaatccaacaactcccgtcacactgggacatgaattttctggtgtcgttgtagaagttgggccagatgtaacaagtatcaaagtgggagaccgtgtcacaagtgaaacaacttttgaaacttgtggagaatgtatttattgtaaggaacgtgattacaatttatgtagcaatcgtcgcggcattggtacgcaagcaaatggtagttttgcagaatttgttttatctcgcgaagaaagttgtcacgtgcttgatgaacgtatttcgctcgaagcagcagcactaacagaaccgcttgcatgttgtgtgcattcggcgcttgaaaaaacaacgattcgtccagatgacacagtacttgttttcggaccaggtccaattggtttgttactagctcaagttgtgaaagcgcaaggggcaacggtgattatggcaggaattaccaaagatagtgaccgcttacgtctagcaaaagagcttggaatggaccggattgtcgatactttaaaagaagacttggctgaagttgtgcttggcatgacagatggttacggagcggaacgcgtatttgattgttctggcgcagtacccgctgtaaatcaaggattacctctaacgaagaaaaaaggcgattttgttcaagtaggactttttgccgaaaagaaaaatgcgattgatgaagaatccattatccaacgtgaaattgcttatatcggcagccgttcgcaaaaaccatcttcttggattttagcgctcgacttactggcaaatggcaaaatcaatacggataaaatgattactaaagtatacggtttggatgactggcgcgaggctttcgaggcagttatggcaggaaatgaaattaaagtattagtgaaatcttaataatggaggatgggctgtatgaaaaaacatcaaaaaaaggataaccgtgcaaacgaatccaaagcttctcgggctcagatgttttacagtagtcatccttagaaatgagccgagaacatattcgcgtatgttctcggttccatttcattataagacgttaaaagaaaaaaatctattaatgaaggtgaaattaaatgaaattaacaattggttgcgaccacggcggacgtagactaaaagatgccattgtgaaacatttacgtgaaaaagatattgaagttgttgatattggaacatatacagatgaaagtgtcgattttccatcttatgcagaagaagttgccaatcaagtagtaagcgggcaatctgaactcggtattttgtgctgtggaactggaataggtatgagtattgctgctaacaaagtggacggaatccgtgctgcggttgtttcggatactttctcagcgcgtgccacccgtgaacataacaatagcaatgttctctgtctaggcgaacgcgttatcggtgaaggattagcgcttttaatagttgatacttggcttgaggcatcatttgcaggagatcgccataaacgccgcttggataaaattactgaactcgaaagaaagtgaggatgaacatgaggaaaatagccgcttcaattatgtgtgcagaccaactacatttaggtgaagagctccgtcgccttgaatctgctggtgtggaactactacactgcgatgtgatggacggtgtatatgtgaataatcttgcgctcggtccagaatatttggaaatagtgcgaaacaatacagaaatccctctagacatacatttggctacgattaccccacttaaatatattgacatgtttggtcctgtgaaaccggaatatatttcttttcatgtagaagtagcggaagacgtgtcagaagtcatccggaaaatccgctcttacaacgttaaaccatcgattgcgataaatccagaaacacctatcgaagccatttatccttatttagatgatgtcgaaatggtgttaatgatgactgtaaacccgggttttgcgggacaaaaatttcaaacagatgtattacaaaagctacatgatttaaaagcaaaactagctggaaaagtccatgcgccgctcattgaagtggatggcaatattaataaagaaacagtaggcttaatgcgagattgcttaccagacatttatgtactaggcacatccgcgttatttcatgaccgagataaaacgagttatgcagaaagactagtacacatttggtcagatgtagaaaaacatgtgtaataaagcacaaacaatttaagggagatgacagttttgaaaaaaacattagatagacaagccgtggacacgattcgttcgttatccattgatatgattgagaaagcaaattcaggacacccaggaatgccgatgggagcagctccaatggcgtatatgctatttgcgaaacatttagtattcaacccagccaacccagaatggtttaaccgcgatcgctttgttttatcagcaggacacgggtctgcgctactttatagcatgcttcatttatttggttatgatgtaaaaatggaagacttaaaacagttccgtcaattagatagtttgacaccaggacaccctgaatttggatggactgctggagtcgatgcaacgagtggcccgcttggacaagggattggtatggcggctggaatggcgcttgcagagtctcatttagcggcggagtataaccaaccaaattatccaattgtcgaccattatacgtatgcgatttgtggtgacggagacttgatggaaggcgtggcatcagaaacagcctcacttgcaggacatttaggacttgggaaattaatcgtattgtacgattccaatgatatttgtttagatggagatttaagcgcaacgttcagtgaaaatgcagcagaccgtttccgcgcatacggctggcaagttttacgtgtagaagatggcaacaatttagcggcaattcaagaaaaaattgttcaagcaaaattagaaacatcgaaaccaacgctaatcgaagtgaaaacagtcatcggttacggcgcaccaacaaaagcaggcagctccgcaagtcacggtgctccgctcggtgaaaaagaagcaaatggtgcaaaagagcattacgaatgggcagaagaacctttcacagtaccagccgaagttcgtgattacttaagaaattacaaagctcgcggggaaaaactagagggtgcttggaacacaatgctcgctaattacaaaaaagaattcccagaacttgcaagtcaattagaccgcgtgttagcgggagaagtagctgccgattggaacgctaatttgccaacttttgaagcaggcacaaatgttgcaacgcgctctgcttcttctgggaaaatgattaacgcaattgcagccgaattaccggaacttttcgggggatccgctgacttaggttgctcgaacaaaacatttattgatgcgagcccagcatatagcattcaagacccagctggtaaaaatatctggttcggtgtgcgcgaatttgcgatgggagcaatgttaaacggaatggcacttcatagcggtttgcgagtgtttggctcgactttcttcgtcttctcagactatgtccgcccagcaatgcggatggctgctttaatgcaacttccagtaacgtatgtattcacgcatgacagtatcgctgtaggtgaagacggcccgacacatgaaccaatcgaacaactagcctcgcttcgtgctatgccaggcctaacagttattcgcccagccgatgccaaagaaacccgcgctgcttgggaaattgccgcaactaacacaaatggtccaatcgcacttgtattatcacgccaagacttaccagtgcttgaaaatgcacaagaagaagtggatgcaggtgtagataaaggtgcttatatcgtagcaccagcaaatagttccaaaccagacgctatcattatcgcaacaggatcagaagtgtcccttgcaattgaagcgaaagccgaacttgcgaaaaaagatatcgacgtttccgttgttagtttatccagctgggaacgctttgaaaaaacaaccgatgcttataaagaaagcattttaccaaaagaagtcacagcgagatttgcgattgaagcaggagcaacattcggttggaaagaatttattgggtcagaaggcgatatgttaggaatcgatcacttcggcgcatctgcccctgcgaaagatttgtttaacgcttatggatttacaccagaaaatgtggcggatcgtgtcgaagctgtgattgcgaaagccggtgtgcgcgtatgacattcgtagcgccatcattactcgcagctgattatatgaacatggcaaactccattaaagaagcagaacatgccggagctgactaccttcatatcgatgtcatggacggacattttgtgccgaatctgacgtttggaattgatatggtcgagcaaatcaagaaaacagcgactattccactggatgtccacttaatgctctcgaacccagaaaactatattgaaaaatttgcagcagctggggcgcacattatttccgtgcatatcgaagcggcgccgcacatccaccgcgtcattcaacaaattaaggcagcgggctgtaaagcgggagtcgtgcttaatccaggaacaccggcgagcgtgctggatgccgttttagcagatgtagatttagttttacaaatgaccgtaaatccagggtttggtggacaagctttcattgattctaccatcaaaaacatgcgctatctggatcattggcgccgagaaaataacggcagctatgtgatcgaagtcgacggtggtgtaaatgccgaaaccgcagaaaaatgtaagcaagcgggcgtagacgttcttgtagcaggctcttacttctttagagcagatgataaaattgcttgtattaaagaattaaaagcgtaacaaaaaaagtgctacaaaccaactagcggtttgtagcacttttttatggagtggtttaacttcttttaaagaaaaagaagctagtagataacaacgtcaataaacttcctagtgcaaaaaagagagcatcttttgaatcaccagtagttgggaggatattagaggtgtttttatcaactttttttgttgcttcggatgaaatcacagtatcattagtactcagtgtagtattgtcggtcatttctccattggtatttgtattatcactgtttgctattttttcataaatataggtaacagttgcaggggttgtgctaaaagtacccgattcatttccttccactttttgaagtttatagcctgctatgtctttgcttttagtttggtaggtattatttacttcaccggttaaaacagtatcttttgctagtgttttacccgattcatcttgatattttacagtgactgtcccattttggacagcagttttttcataaatatacgttacattttgcagtgtttcagaaaattgtcctgtcgcatttccgggtgtttcttttaaagtatagccatctattattttaggagtagtgacgtaattttcaccaatactaccatctaatctagtagaagtagctaattcattcccagacgcatctttataggaaactaggactggtttagtatacttgaagtagataaatggctttccagaaggaccatattcagaaatatcatagtaagaatcaaatcgatttgtcccagtgaaaagtgaaaaagtagattcgagtggctctgctgaaaagtttaatgctttttcggcttgattatacgtaataccattcgctaaatcagttatgaataaattatctgtagtcaaatgagccgaagcatcttgaaactgaatgtaattttctataggtaggatgtggttgcttggtacaatgagtgtacttaaaactgtttgagcggcaaaagcttgataagccatttgaagatttgggttttgaattgtaatattagtaataaaattattttcaaaggcagaagcatcaatactttcaacagtggctggtgtagtcactgtttttaaattattagctaaaaatgcttgggaaggaatattttttaaagcagtagaataagttattttttctaatttattgacactaaaagagttcctccctatagtctgcactgagttgggtaagactagttgttcaagtgaattgatggtaaaagcaccatcgccaatagttataactgtattaggaatcgttacattagttaatctcttggatttgaatgcgccattcccgatagcagtaacggtatattcattattagtaccaagtgttgtaggaatggtaatatcagtagactgtcctgtataatcagtaatggtagcttcatttccatttattgtatattcatagtcaccagatgtttcggcagaaccaatagttggaaataaaaacaagaatatggcaaaacaaaaaataccccaaaatcttctttgtaacacagaaaagcccccttacttgagtttttttatattttcccttacacaaaacatctaaacttttctatattcatatctgtgtggaataagttttttttaattgatacatgtctagctctagcttatacttaaattaatacgacaacaaaaaggaagagatattatgacacaactagcatttcgaaacgggacagaacaagacacgacgttaattcttcgttttattaccgaacttgcaattcatgaaggcattgaaaaagatgtagtagcaaccgaatccggcctacacaaagccctttttcaagaaaaatctgccgaagtaattatcgctgaatacgaaggggagccagttggtttcgcactctttttccataacttttccacattacttggcaaaaaaggcttatacctagaagacctttacatcattccagaaatgcgcggaaaaggctttggaacaaaatttttcagctatttatccaaactcgctttatcacgcgattgcggcagatttgaatggtggtgcctaaacgaaaataaatcaggcatggatttttacgaaaaaattggcgcagagaaaatgtcagaatggaccgtacataggctcactaaagccgaaatggaaaaactaagcaacctatgaaaggatgggatttaaatgaaatgggataaactattaaatgataaacgccgccgcgaatccggtgtcactcgttcgaaaaacaccgacgtacgtagcgctttcgaaaatgattttcagcgtatcgttatgagtgcatcgtttcgccgtttacaagataaaacccaagtattcccgctagaaaaaagcgattttgtgcgtacacgactaacccattcaatggaagtaagtacgattgcaaaatcaatgggaaacatggttacacacacgattcaagaagaaaacttagacaaagattttacaaaagatcatgcggataaaattccggaaatccttgcttgtgcaggactgttacatgatatggggaatccgccgttcggtcactttggtgaagaaagtatccgtgagtggttccgcgacaatttagcaaccatcacttacaaaaataaaaacctagctgaaatcctaacaccgcaaatgaaagaagacttttattactttgaaggtaacgcgcaagtgcttcgtgtagtttccaaactgcattatcttttcgaccaatacggcttaaacctaacatttgccactttaaatgcggtcatcaaatacccagtttcttccttaaaagtaaataaaaaacaaatcaaaagcaaaaaactaggctatttttatgccgatgaatcactttttaatgaaataacaacagcaacagaagcgcttgataaccgtcatccgctcacttatttactagaagtggcagacgacatcgcgtacctaaatgccgacctagaagacggcgtgaaaaaaggtatcgtcaacatcacgcaaatcttaaaaggttttgaagaagtagaagagcataataaagtaactgccgcgtgctacaacgaacttaagaaaaaaagcgagcgctacgaagggcaagaagaaagtttcatcgtacaacaatggctcgcatcgaacgtccgcggccaattaatcaatcgctcactcgaagtattttacgagaactacgacgccatcatggcaggcacattcaacgactcacttatcgatgcttcaagcgccgaacaactcgtacaaattttacaaagcctatcattcacgtacatttaccaagataaaggcattgttgaatccgaaatcgccggcaacgaaatcatctccaaattgctcgaaacgttcatcccagctgtgatttactacgacagcgaaacaccagaacgccaaacagccaaagataaacgcctactaaccttgatttccgacaactacctaggctgttaccgcaaaaacgcagaaggcgaaagcgaaacaatgaaactgtacttgcgattacttctcgtaacagacttcatttgcggcatgaccgacagctacgcgaaagatttatatcaacgtttgaatggacttagctaattaactaaatttcaagtaacaccttgacatccgaacgtcaaggtgttactatattcaaggtgcctctactataaacagaggtctgaaaataaaacagcgttgtaggttgaacttacagccattttattttaccgaaaaaatgaaccacctggatgtgtggaactactaaacaaggaaggaggaatttatcccatgcctacaattaaccaattagtacgcaaacctcgtcaatctaaaattaaaaaatctacatcacctgctttgaacaagggcctaaacagttttaaaagagaactaacagacgttaactctccgcaaaaacgtggcgtatgtactcgtgttggtaccatgactcctaaaaaacctaactcggcgcttcgtaaatatgcccgtgtacgtttgagtaatggtattgaagtaacagcttacattcctggtattggtcacaacttacaagaacatagtgttgttcttattcgtggtggacgtgtaaaagatttaccaggggtacgttatcatatcgttcgtggagcgcttgatacagctggtgttgaaaatagaggacaaagccgttctaaatacggtacgaaaaaacctaaaaaataatacttataaaatatgaaaggaggatatccgatgcctcgtaaaggtcctgttgctaaacgtgacgtgttaccagatccgatttataattcgaaactagtaactcgtttaattaataaaatgatggttgacggaaaacgtggaaagtctcaagctatcctatattccgcattcgatatcattgcacaagaaactggtaaagatccgatggaagtatttgaacaagctatgaagaacattatgcctcttcttgaagttaaagctcgccgtgtaggtggtgctaactatcaagtacctatcgaagtacgtgctgaccgtcgttctactcttggtcttcgttggttagtaaattatgctcgccttcgtggagagaaaacaatggaagtacgtgttgctcgcgaaatcatggacgctgccaataatactggtgcttctgttaagaaacgcgaagatacacacaaaatggctgatgctaacagagcgttcgctcactatcgttggtaaaaaaatcactgacaaattccaggcgtattgcctgaaaaattgttttatggaaggagaaatacaacatggctagagagttctccttagaaaagactcgtaatattggtatcatggcccacattgatgcgggtaaaactaccactactgaacgtatccttttctatacagggcgtattcacaaaattggtgaaacccatgaaggtgcttctcaaatggactggatggagcaagagcaagaacgtggtattactatcacttctgctgcgacaacagctcaatggaaaggctaccgagtaaacattatcgatacaccaggacacgtagacttcacagttgaagttgaacgttcgcttcgtgtacttgatggtgctgttgcggttctagatgcacaatctggtgtagaaccacaaacagaaacagtttggcgtcaagctactacttacggggttcctcgtgtagtattcgtcaacaaaatggacaaaatcggcgcagacttcctatattctgtaggtactttgcatgaacgtttggctgccaacgcgcacccaatccaactcccaatcggggccgaagatacatttgaaggtatcattgacttaatcgaaatgaacgcgttgtattacgaagatgatttaggaaatgaccctcatattaaagaaattccagctgatctgaaagacttagcagacgaataccgcggtaaattagtggaagcagttgctgaacttgacgaagagctaatgatgaaatacctagaaggcgaagaaattacaaaagaagaacttaaagctggtatccgtaaaggaacacttaacgttgagttctatcctgtagtttgtggtacagcattcaaaaacaaaggtgttcaaccaatgttagatgcagtacttgattaccttccagcaccaacagatgttccagctattaacggcgtattgcctgatggagaagaagctgctcgtcacgctgatgattcagaaccattctcttccctagcattcaaagttatgactgacccttatgttggacgcttaactttcttccgtgtttattccggtactttgaattccggttcatatgtacaaaactcgactaaaggtaaacgtgaacgtgttggacgtatccttcaaatgcacgctaatcaccgtgaagagatttcaatcgtatacgctggtgacatcgctgctgccgtaggacttaaagatacaactactggggacactttatgtgatgaaaaagaacaaattatcttagaatccatggaattcccagaaccagttatccaagtcgctatcgaacctaaatcgaaagctgaccaagataaaatggggcaagctcttgcgaaactagcggaagaagatccaactttccgtgctgaaactgaccaagaaactggccaaactcttatctccggtatgggtgaacttcaccttgacatccttgttgaccgtatgagacgtgaattccgcgttgaagctaacgttggtgatccacaagtttcttatcgtgaaacattccgtaaatctgctcaagttgaaggtaaattcgtacgtcaatccggtggacgtggacaatatggtcacgtttggattgaattcggaccaaacgaagaaggtaaaggataagaatttgaaaatgcaatcgttggtggggttgttccacgtgaatacatcccagctgtacaagcaggtcttgaaggcgcactagataatggtgtacttgcaggctacccactgattgacatcaaagcaaaactttacgacggatcttaccatgacgtcgattccaatgaaatg

SEQ ID NO: 3890 - DNA, 4199 bp, Listeria monocytogenes 4b
  misc_feature (1)..(end): n can be any nucleotide: a,g,c or t/u
cgacgtgccctggaagtggactaggggcccttctcgggttaccgaattcagatgaactccgaatgccatgtacttatactcgggagtcagactgcgagtgataagatccgtagtcgaaagggaaacagcccagaccaccagttaaggtccccaaatatatgttaagtggaaaaggatgtggggttgcttagacaaccaggatgttggcttagaagcagccaccattgaaagagtgcgtaatagctcactggtcgagtgaccccgcgccgaaaatgtaccggggctaaacatattaccgaaactgtggatgaacctcttcggaggttcgtggtaggagagcgttctaagggcggtgaagtcagaccggaaggactggtggagcgcttagaagtgagaatgccggtatgagtagcgaaagaagggtgagaatcccttccaccgaatatctaaggtttcctgaggaaggctcgtccgctcagggttagtcgggacctaagccgaggccgataggcgtaggcgatggacaacaggtagagattcctgtaccagtgctaattgtttaaccgatggggtgacacagaaggatagggaatcgcacgaatggaaatgtgcgtccaagcagtgagtgtgagaagtaggcaaatccgcttctcgcgaagcatgagctgtgatggggaaggaaattaagtacggaagttcctgatttcacgctgtcaagaaaagcctctaggaagagtagtactgcccgtaccgcaaaccgacacaggtagatgaggagagaatcctaaggtgagcgagagaactctcgttaaggaactcggcaaaatgaccccgtaacttcgggagaaggggtgctctattagggtgcaagcccgagagagccgcagtgaataggcccaggcgactgtttagcaaaaacacaggtctctgcaaaaccgtaaggtgacgtataggggctgacgcctgcccggtgctggaaggttaagaggagtgcttagcttcggcgaaggtacgaattgaagccccagtaaacggcggccgtaactataacggtcctaaggtagcgaaattccttgtcgggtaagttccgacccgcacgaaaggcgcaacgatctgggcactgtctcaacgagagactcggtgaaattatagtacctgtgaagatgcaggttacccgcgacaggacggaaagaccccgtggagctttactgcaacctgatatggaatgtttgtaccgcttgtacaggataggtaggagccgaagagacgtgtgcgctagcatacgaggaggcaatggtgggatactaccctggctgtatgaccattctaacccgccacgcttagcgcgtggggagacagtgtcaggtgggcagtttgactggggcggtcgcctcctaaagagtaacggaggcgcccaaaggttccctcagaatggatggaaatcattcgcagagtgtaaaggcacaagggagcttgactgcgagactgacaagtcgagcagggacgaaagtcgggcttagtgatccggtggttccgcatggaagggccatcgctcaacggataaaagctaccccggggataacaggcttatctcccccaagagtccacatcgacggggaggtttggcacctcgatgtcggctcgtcgcatcctggggctgtagtcggtcccaagggttgggctgttcgcccattaaagcggcacgcgagctgggttcagaacgtcgtgagacagttcggtccctatccgtcgcgggcgcaggaaatttgagaggagctgtccttagtacgagaggaccgggatggacacaccgctggtgtaccagttgttccgccaggagcatcgctgggtagctatgtgtggcagggataaacgctgaaagcatctaagcgtgaagcccccctcaagatgagatttcccatttcttcggaaagtaagatccctgaaagatgatcaggtagataggtttggagtggaagtgtagcgatacatggagcggacaaatactaatcgatcgaggacttaaccaaaaaatgaaacgaagttacctaactgaaccctttcttctctagttttgagagagcaatctttcaacaacttaaatattgtctggtagttatggcgagaaggtcacacccgttcccatcccgaacacggtagttaagcttctctgcgccaatggtagttgggggcttccccctgcgagagtaggtcgctgccgggcagtatttctggaggtttagctcagctgggagagcatctgccttacaagcagagggtcagcggttcgatcccgttaacctccattttttatgccggcttagctcagttggtagagcaactgatttgtaatcagtaggtcgcgagttcgactcttgcagccggcaccattaatattaactttatgataatacatatttttattgtagagagccgttagctcagttggtagagcatctgacttttaatcagagggtcgctggttcgaacccagcacggctcacttttgcgggtgtggcggaattggcagacgcaccagatttaggatctggcgccgcgaggcgtgggggttcaagtcccttcacccgcacttattatggaatatgcggaagtagttcagtggtagaacatcaccttgccaaggtgggggtcgcgggttcgaaccccgtcttccgctccatattttatagcaacgccggggtggcggaactggcagacgcacaggacttaaaatcctgcggatagtgatatccgtaccggttcgattccggtcctcggcacttttatttgcgcccatagctcaactggatagagtacttgactacgaatcaagcggttagaggttcgactcctcttgggcgcactttattaaacgggaagtagctcagcttggtagagcacttggtttgggaccaaggggtcgcaggttcgaatcctgtcttcccgatagtttaatcccttattattatggggccttagctcagctgggagagcgcctgctttgcacgcaggaggtcagcggttcgatcccgctaggctccacttgcttcacatttaagtagaaaatagttgccttattattatggcggtgtagctcagctggctagagcattcggttcatacccgaaaggtcgtgggttcgactccctccgccgctattttcaatcttggacctttagctcagttggttagagcagacggctcataaccgtccggtcgcaggttcgagtcctgcaaggtccacttgtcactttattattatcatggaggaatacccaagtctggctgaagggatcggtcttgaaaaccgacaggcgggtaataccgcgcgggggttcgaatccctcttcctccgtttttcacttgtgatatgtggactaaaatttaatattattgtcgcggggtggagcagtctggtagctcgtcgggctcataacccgaaggtcgtaggttcaaatcctgcccccgcaatagtggttccgtggtgtaggggttaacatgcctgcctgtcacgcaggagatcgcgggttcaaatcccgtcgggaccgccattatggcttggtagctcagttggtagagcacttgattgaagctcaaggtgtcggcagttcgattctgtcccaagccattctttttttaaacatttttgccttatggcggatatggcgaagtggttaacgcacctgattgtggttcaggcattcgtgggttcgattcccattatccgccctttgtttttaaaaattatattatgcgggtgtagtttagtggtaaaactacagccttccaagctgttgtcgtgggttcgattcccatcacccgctttttaccatgaatatagttttactggggcctatagctcagctggttagagcgcacgcctgataagcgtgaggtcgatggttcgagtccatttaggcccattttattccacagtagctcagttggtagagcaatcggctgttaaccgatcggtcgcaggttcgagtcctgcctgtggagttattctttcaataagaataagttttttatatctggggaagtactcaagtggctgaagaggcgcccctgctaagggtgtaggtcgctcgcgcggcgcgagggttcaaatccctccttctccgccagatatggcccgttggtcaagcggttaagacaccgccctttcacggcggtaacacgggttcgaatcccgtacg

SEQ ID NO: 3891 - DNA, 5015 bp, Listeria monocytogenes 4b
  misc_feature (1)..(end): n can be any nucleotide: a,g,c or t/u
aaacatcaaaatcgcattagctgatccagcagtagaaacggatcattttgttcataatatagaagaacttctcacccaattcggcgtaaatgaaataaatattgagctagaatacctacccgcagcagttattgaccgcattttccaagcaagagataacatactctcagaagctagtgaaacgaaattcttagcaatagcgagtggtaaaggtggcgtcgggaaatcaactgtctctgcgaatcttgcaatcgccttagcacaacaaggcaaaaaagtaggattattagacgcggatatatatggattcagtattcctgtactgctaggaacaaccgaatccccccgcaaagaaaatggtcaaatcatcccagtcgaaacacacggcattcaaatgatttctatggatttttttgtggaacaaggagaaccagttatctggcgcggaccaatgctagggaaaatgattaaaatgtttttagaagaagtaagatggggaaaaccagactatttacttatcgatttaccacctggaactggagatgttgcgctagatatccatacgcttatcccgaaatgcaatgaacttattgttacaacaccacattatgcagccgcgtcagtcgcatctcgagcaggatatatggcagcaaaaaacaatcacaaaatcatcggtgtaatcgaaaatatgtcttatcttactttagctgatggacaagtattaaaagtattcggacaaggcggcggcgaaaaagttgctgcagacttagaaacacaacttttaattcaactgccaatagaacaaccagaaccaaatggaaatggctatgtatcagcccttttcaactcttcaagcacttcaggaaaagcatataaaaccctagcagagaaaataattccatatttatcataaaaactttgtaaaaagtattgacgaaaggcaaaaatcttggtatatttataaacgttgctgatgcggacaaaacgctttcgcaacaaaagaaactgacctttgaaaactggacaaaaaagaagacgaaaagcaatgagacgtaaagtctcactggtaatcgcagggcagaaaacagaaagctgttttcaacaaaacaaactagtaatttaattgctagcgaagtcaatttgacgcaaggaatcttattcacggtgttgaataagtattcaaattcaatttatattttaaagagagtttgatcctggctcaggacgaacgctggcggcgtgcctaatacatgcaagtcgaacgaacggaggaagagcttgctcttccaaagttagtggcggacgggtgagtaacacgtgggcaacctgcctgtaagttggggataactccgggaaaccggggctaataccgaatgataaagtgtggcgcatgccacgcttttgaaagatggtttcggctatcgcttacagatgggcccgcggtgcattagctagttggtagggtaatggcctaccaaggcaacgatgcatagccgacctgagagggtgatcggccacactgggactgagacacggcccagactcctacgggaggcagcagtagggaatcttccgcaatggacgaaagtctgacggagcaacgccgcgtgtatgaagaaggttttcggatcgtaaagtactgttgttagagaagaacaaggataagagtaactgcttgtcccttgacggtatctaaccagaaagccacggctaactacgtgccagcagccgcggtaatacgtaggtggcaagcgttgtccggatttattgggcgtaaagcgcgcgcaggcggtcttttaagtctgatgtgaaagcccccggcttaaccggggagggtcattggaaactggaagactggagtgcagaagaggagagtggaattccacgtgtagcggtgaaatgcgtagatatgtggaggaacaccagtggcgaaggcgactctctggtctgtaactgacgctgaggcgcgaaagcgtggggagcaaacaggattagataccctggtagtccacgccgtaaacgatgagtgctaagtgttagggggtttccgccccttagtgctgcagctaacgcattaagcactccgcctggggagtacgaccgcaaggttgaaactcaaaggaattgacgggggcccgcacaagcggtggagcatgtggtttaattcgaagcaacgcgaagaaccttaccaggtcttgacatcctttgaccactctggagacagagctttcccttcggggacaaagtgacaggtggtgcatggttgtcgtcagctcgtgtcgtgagatgttgggttaagtcccgcaacgagcgcaacccttgattttagttgccagcatttagttgggcactctaaagtgactgccggtgcaagccggaggaaggtggggatgacgtcaaatcatcatgccccttatgacctgggctacacacgtgctacaatggatagtacaaagggtcgcgaagccgcgaggtggagctaatcccataaaactattctcagttcggattgtaggctgcaactcgcctacatgaagccggaatcgctagtaatcgtggatcagcatgccacggtgaatacgttcccgggccttgtacacaccgcccgtcacaccacgagagtttgtaacacccgaagtcggtagggtaacctttatggagccagccgccgaaggtgggacagataattggggtgaagtcgtaacaaggtagccgtatcggaaggtgcggctggatcacctcctttctaaggaaaaggaaacctgtgagttttcgttcttctctatttgttcagttttgagaggttactctcttttatgtcagataaagtatgcaaggcactatgcttgaagcatcgcgccactacatttttgacgggcctatagctcagctggttagagcgcacgcctgataagcgtgaggtcgatggttcgagtccatttaggcccactttttctttctgacataagaaatacaaataatcatacccttttacggggccttagctcagctgggagagcgcctgctttgcacgcaggaggtcagcggttcgatcccgctaggctccaccaaaattgttctttgaaaactagataagaaagttagtaaagttagcatagataagtaattatctatgacacaagtaaccgagaatcatctgaaagtgaatctttcatctgattggaagtatcatcgctgatacggaaaatcagaaaaacaacctttacttcgtagaagtaaattggttaagttagaaagggcgcacggtggatgccttggcactaggagccgaagaaggacgggactaacaccgatatgctttggggagctgtacgtaagcgttgatccagagatttccgaatgggggaacccactatctttagtcggatagtatccttacgtgaatacatagcgtgaggaaggcagacccagggaactgaaacatctaagtacctggaggaagagaaagaaaaatcgatttcctgagtagcggcgagcgaaacggaaagagcccaaaccaagaagcttgcttcttggggttgtaggacactctatacggagttacaaaagaaagttataaatgaagcggtctggaaaggcccgccaaagacggtaacagcccggtagttgaaatggctttccctccagagtggatcctgagtacggcggaacacgtgaaattccgtcggaatccgggaggaccatctcccaaggctaaatactccctagtgaccgatagtgaaccagtaccgtgagggaaaggtgaaaagcaccccggaaggggagtgaaacagttcctgaaaccgtgtgcctacaagtagttagagcccgttaatgggtgatagcgtgccttttgtagaatgaaccggcgagttacgatttgttgcaaggttaagcggaaaaagcggagccgtagcgaaagcgagtctgaatagggcgcataagtaacaggtcgtagacccgaaaccaggtgatctacccatgtccaggatgaaggtaaggtaatacttactggaggtccgaacccacgcacgttgaaaagtgcggggatgaggtgtgggtagcggagaaattccaatcgaacttggagatagctggttctctccgaaatagctttagggctagcctcgaggtaaagagtcatggaggtagagcactgtttggactaggggcccttctcgggttaccgaattcagataaactccgaatgccatgtacttatactcgggagtcagactgcgagtgataagatccgtagtcgaaagggaaacagcccagaccaccagttaaggtccccaaatatatgttaagtggaaaaggatgtggggttgcttagacaaccaggatgttggcttagaagcagccaccattgaaagagtgcgtaatagctcactggtcgagtgaccccgcgccgaaaatgtaccggggctaaacatattaccgaaactgtggatgaacctctttagaggttcgtggtaggagagcgttctaagggcggtgaagtcagaccggaaggactggtggagcgcttagaagtgagaatgccggtatgagtagcgaaagaagggtgagaatcccttccaccgaatatctaaggtttcctgaggaaggctcgtccgctcagggttagtcgggacctaagccgaggccgataggcgtaggcgatggacaacaggtagagattcctgtaccagtgctaattgtttaaccgatggggtgacacagaaggatagggaatcgcacgaatggaaatgtgcgtccaagcagtgagtgtgagaagtaggcaaatccgcttctcgcgaagcatgagctgtgatggggaaggaaattaagtacggaagttcctgatttcacgctgtcaagaaaagcctctaggaagagtagtactgcccgtaccgcaaaccgacacaggtagatgaggagagaatcctaaggtgagcgagagaactctcgttaaggaactcggcaaaatgaccccgtaacttcgggagaaggggtgctctattagggtgcaa

SEQ ID NO: 3892 - DNA, 771 bp, Listeria monocytogenes 4b specific
  misc_feature (1)..(end): n can be any nucleotide: a,g,c or t/u
tttgnnnnnnnnnnnnnnnnnnnnnnnnnnnnnnnnnnnnnnnnnnnnnntaaaggaagtattaatcctaaattagataaactaatttcaagtctagacaattttgataatatcaataagaaaatgggcactatagtaggtagccaggagattagtggggaagcagcagatgctttatctgagagcctattagtgctagtaagttatggggaacaatatagtttagtaattagaaacctaaaagaagtgatagtcgactattgtaaaagtgtggaagaaattgataaaacagcagcaaacgcagtaagtaaaggcgtttaaaaagaaagaggttaaactatgaaaagtagaaattggttaaaaggattgggagtaacaatgattgtcgttactttaattttaacgggatgcggaaatggagacgctgaaaagacagatacaaaggaacagactaaaagtgttgaagaagaaggaaaagaagtaaagattgagnnnnnnnnnnnnnnnnnnnnnnnnnnnnnnnnnnnnnnnnnnnnnnnnnnnnnnnnnnnnnnnnnnnnnnnnnnnnnnnnnnnnnnnnnnnnnnnnnnnnnnnnnnnnnnnnnnnnnnnnnnnnnnnnnnnnnnnnnnnnnnnnnnnnnnnnnnnnnnnnnnnnnnnnnnnnnnnnnnnnnnnnnnnnnnnnnnnnnncttacatgttctgcaattcttgtgaatggaactgacacaaatattgaagaccttagcttcaaagctgaaataatgaataag

SEQ ID NO: 3893 - DNA, 751 bp, Listeria monocytogenes 4b specific
  misc_feature (1)..(end): n can be any nucleotide: a,g,c or t/u
ggcttacttttngnngcattccggngacgctantagcatctgcgagggccaccagtgtgctggaaatgatgaatcaaacaatcactctaaagcaaaaagttatcgtgtcagacctagttcttgataatgaagtgaagaatttcggtcaaataaccactgccaaatccatctctaataagggaacctatcaaaataaccaaatcaagtggctttttgaagatataaaaagcgtgaatgccgttttttatcaatttagtgaacctgttcaagaggcaactattcaaggaactttttcggggaaagtgacacaaccaatcaaagcatctaaagtaccagttattagcgcagatgcagagatgaattacccgaaaaacgaaacggtatcagaagctggctttttcaaagatatttctgcaagcgtaacggatgatgcaacactaacttctgattttgaaagtgttgtggactttgcaaaagcgggaacgcgtgaagcgacattcactgccttgaatgaggatggacccaaagtcactctcgccactgtctcccccgttatcccccccccctttctcctctcccccccttccccctccgacctctttcccctcccccttccccccctttcccctctcctcctttccccccctcctcccccccgcgttcctctctctctcccctcccccccccgtcccttgctttcccctccgctcctcccccttcttctccccccccttctcaacaaaaaaaaaaa

SEQ ID NO: 3894 - DNA, 785 bp, Listeria monocytogenes 4b specific
  misc_feature (1)..(end): n can be any nucleotide: a,g,c or t/u
ntcgataaggtcactgnnnnnnnnnnnnnnnnnnnnnnnnnnnnnnnnnnnnnngtgctttcatgtcatttaatattcccaagtgaaatggagctaagtgacctataggagtcaaacttattttattgcctgttaacacttttatttctattaatccgtctgtattgagctttattttatttttagaacctagccgaaaaaccaaatattgaaattcatcaaaaaaactctttatgtgcgggacgggtctaatgtaatctatatcgctcttcgtcgctgacaccccgccctactttaatgctatggaagcgggtgcattctgggggtgtgctggcgtgcggggaaaagctcccgcgctcggcccgtgcgtgtccgtcgcgggcctcgccctggtccctctccctccccctgggtccctcgtccccccctgcgccctccctccccccgtcccccgcccccccctgctgttccttcaccctcgccctctcctccctcccccccccgcgccctttctctccccccccccgccctcgctcctctcgcgctcccgcccgtccctcccctcgcctcccccccgcgcgcgcctcccctctcctcgcgggcgcgtcttgcccgccccccctgtcgccctcgccgggcccccgcctgtcggccctgtgtctgctgccgtttctccggccgtcgccgtgcgggccctgcggccggccgcccgccgctccgtgccgcgccccccccctccccctccgtcttttccgctgcctccgacgcgaattaaaccccacaag

SEQ ID NO: 3895 - DNA, 740 bp, Listeria monocytogenes 4b specific
  misc_feature (1)..(end): n can be any nucleotide: a,g,c or t/u
tctnnnnnnnnnnnnnnnnnnnnnnnnnnnnnnnnnnnagaaggctatttnnnnnnnnnnnnnnnnnnnnnnnnnnnnnnnnnnnnnnnnnnnnnnnnnnnnnnnnnnnnnnnnnnnnnnnnnnnnnnnnnnnnnnnnnnnnnnnnnnnnnaagatacaaataaagcagaagcgggcggtggagataagccctgaacaccctcttgtataaaagtgagtacaacaggtcatggcgagagtggaaacttggaaaatagatgtgatgttaaatgaccaggtacaggggatgataatgcaactgagggattagtgggctggggattactaatgtgggggctaaagattaggctgactgagaaaggggggggtgggtgggagggtatggaaatccaaaaaacagcgcatttgcccgctccgacgacataaacgcgccgcagacggctcgataggacaccgacacccaccaacagcgaacccaggtgccggctccgtccgagattgcgaaatgtatgggagtgaatattgccgacaacgacagggcatgcgcccgcacgtgctgtgcctgccgaatgcctctaaatcaatcatcgaagcggcacagtcagtcaagctcgaattcacgggcgcgatggcccccgttatctataacgctgtcatgcacgcgcagtgtagaccgcgatgtagcaatattatagcataacatgcgttggatgcaaccgatcaccacaggcccaaccctn

SEQ ID NO: 3896 - DNA, 782 bp, Listeria monocytogenes 4b specific
  misc_feature (1)..(end): n can be any nucleotide: a,g,c or t/u
ctaaaaaaaagaactcgccggcaacgtaccgcgctctgatccgctagtaccggccgccagtgntgctggaaagnnnnnnnnnnnnnnnnnnnnnnnnnnnnnnnnnnnnnnnnnnnnnnnnnnnnnnnnnnnnnnnnnnnnnnnnnnnnnnnnnnnnnnnnnnnnnnnnnnnnnnnnnnnnnnnnnnnnnnnnnnnnnnnnnnnnnnnnnnnnnnnnnnnnnnnnnnnnnnnnnnnnnnnnnnnnnnnnnnnnnnnnnnnnnnnnnnnnnnnnnnnnnnnnnnnnnnnnnnnnnnnnnnnnnnnnnnnnnnnnnnnnnnnnnnnnnnnnnnnnnnnnnnnnnnnnnnnnnnnnnnnnnnnnnnnnnnnnnnnnnnnnnnnnnnnnnnnnnnnnnnnnnnnnnnnnnnnnnnnnnnnnnnnnnnnnnnnnnnnnnnnnnnnnnnnnnnnnnnnnnnnnnnnnnnnnnnnnnnnnnnnnnnnnnnnnnnnnnnnnnnnnnnnnnnnnnnnnnnnnnnnnnnnnnnnnnnnnnnnnnnnnnnnnnnnnnnnnnnnnnnnnnnnnnnnnnnnnnnnnnnnnnnnnnnnnnnnnnnnnnnnnnnnnnnnnnnnnnnnnnnnnnnnnnnnnnnnnnnnnnnnnnnnnnnnnnnncaatggatggattttattacggaacactatatctttctgttcgacaggtacataaaagacactagccnnnnnnnnnnnnnnnnnnnnnnnnnnnnnnnnnnnnnnnnnnnnnnnnnnnnnnnnnnnnnnnnnna

SEQ ID NO: 3897 - DNA, 774 bp, Listeria monocytogenes 4b specific
  misc_feature (1)..(end): n can be any nucleotide: a,g,c or t/u
ggctgncctatttnnnnngtcgctcggtcacggcnnnnnnnnnnnnnnnnnnnnnnnnnnnnnnnnnnnnnnnnnnnnnnnnnnnnnnnnnnnnnnnnnnnnnnnnnnnnnnnnnnnnnnnnnnnnnnnnnnnnnnnnnnnnnnnnnnnnnnnnnnnnnnnnnnnnnnnnnnnnnnnnnnnnnnnnnnnnnnnnnnnnnnnnnnnnnnnnnnnnnnnnnnnnnnnnnnnnnnnnnnnnnnnnnnnnnnnnnnnnnnnnnnnnnnnnnnnnnnnnnnnnnnnnnnnnnnnngctattcgcacaaagcagacgttcattcgctattgcattttgattgacatgaagacctgtgtccctgaaagttttctcccctgcccccacctctcacatttggccgctccgcccgcggcatgtggccggatgtcgccctgaagactggcatgtaatgttgcgtcggtgggggggtgcccgcgtcctgtgcgcccctccctccccccccccgctcccctcctttcctccccccctgtcccgtcctccccgcctctcccctcccctcctccctcgctccccccccgccccccgccctcgtcgcgcctctcctccctccccgcttgctcgttcttcgtccgccggccgcccccctcgtgccccgttcccgctctttcttctcccgccccttctttttgccccgcccccccctccccccctcgtggtgcgtgggcaccctcccctccgccgcgcgtggtcgccgtgcgtgataccaaagttgacccct

SEQ ID NO: 3898 - DNA, 115 bp, Listeria monocytogenes 4b specific
  misc_feature (1)..(end): n can be any nucleotide: a,g,c or t/u
ttttaagtaagacggtcatagtatcaagttcttctgatattgttttactaacagtcaagatttctcctgtttttaaattaatattatatgccggtttggtttcaaatttgatttc

SEQ ID NO: 3899 - DNA, 75 bp, Listeria monocytogenes 4b specific
  misc_feature (1)..(end): n can be any nucleotide: a,g,c or t/u
ggctaaagtcacttactcgctgctcggcggccgacatgtgctggaaaggttgttcgagaaacactcatttgcacc

SEQ ID NO: 3900 - DNA, 45 bp, Listeria monocytogenes 4b specific
  misc_feature (1)..(end): n can be any nucleotide: a,g,c or t/u
gtggagattttggatgttgtgtttaaacaattagaggtggattta

SEQ ID NO: 3901 - DNA, 22 bp, Listeria monocytogenes 4b specific
  misc_feature (1)..(end): n can be any nucleotide: a,g,c or t/u
acggccgaactgtgctggaaag

SEQ ID NO: 3902 - DNA, 698 bp, Listeria monocytogenes 4b specific
  misc_feature (1)..(end): n can be any nucleotide: a,g,c or t/u
ggttttatttgaactacaactggtcctacacctgagatggacttggggctgtgcttacggatgcaaatgtggtgggaattgctccgataccgaccaattctctcatcgctgggaatagtgtactggcaacatgcgtctgatggaaggacatgaaccatttgatctggactcaggttgctgacagccgatgtcagagatcattaccggagtcttggaaatccatcatggacggttgtagaacctataaaggcatgatacgaactgaaataagaccccttgtaatggctgttttttactttgaacgatgttaaccatattcgttactagttctgactctgagtctcaggctgggtcttgcacggcttcaccagcattttacttgaatactgcgtaccatctgcgtgccatctgcgttgactgtgtaggcgactattgcaccgccttggaccgattaaccgtcgagctaatcgattacatcctctgttagactaacagactaccggcgcgtaccactagcaatactacctgctaagatgtaacatgaggctctgcgactagaactgctgaacatggtcagaactacttcatagactaatggcggcatcgtgagctaagcatggatctcaagcgggatgagcagcatactgcatacctctaaagctggttataccatgcgctacgatgctgtcgagcgtact

SEQ ID NO: 3903 - DNA, 283 bp, Listeria monocytogenes 4b specific
  misc_feature (1)..(end): n can be any nucleotide: a,g,c or t/u
accgtataccggccgccagtgtgctggttcatgccacctaattatcgctttttggccatgggctaattgaaattcatacttaacaccattcttcaaggtatctgtagttttaaaagtgtttggtgttccttttggtattatatcacccaaatcttttaagcttatttctcctctttctaaaagatgttcaaccactaatcgtgcttgatctctatttaaggttgctacagaatatcttccaagatcaacttctactttttctgatttcttagctattattttt

SEQ ID NO: 3904 - DNA, 702 bp, Listeria monocytogenes 4b specific; identical to SEQ ID NO: 2945
  misc_feature (1)..(end): n can be any nucleotide: a,g,c or t/u

SEQ ID NO: 3905 - DNA, 78 bp, Listeria monocytogenes 4b specific
  misc_feature (1)..(end): n can be any nucleotide: a,g,c or t/u
cgcgataaaaaatatttttagtacataaccatagcatttaccctttttccaaaagagtttcaatgctatacaaaaaga

SEQ ID NO: 3906 - DNA, 721 bp, Listeria monocytogenes 4b specific; identical to SEQ ID NO: 2943
  misc_feature (1)..(end): n can be any nucleotide: a,g,c or t/u

SEQ ID NO: 3907 - DNA, 160 bp, Listeria monocytogenes 4b specific
  misc_feature (1)..(end): n can be any nucleotide: a,g,c or t/u
tactttttcaccattcttaattacattattcgccccttttagatattcatttatattcgaatatgcacctttaaactcccctccatgttttgtaaaatggttttccaatttttctatatcgtcaaatttaagtccactggatttcttaggtattatcgct

SEQ ID NO: 3908 - DNA, 69 bp, Listeria monocytogenes 4b specific
  misc_feature (1)..(end): n can be any nucleotide: a,g,c or t/u
accgaacccgctaacttaattaatctagataagtatactgatattaaaaaaagcgagaaaccttttata

SEQ ID NO: 3909 - DNA, 38 bp, Listeria monocytogenes 4b specific
  misc_feature (1)..(end): n can be any nucleotide: a,g,c or t/u
tgtgacataaacgtttatctaatttagtgaataatagc

SEQ ID NO: 3910 - DNA, 66 bp, Listeria monocytogenes 4b specific
  misc_feature (1)..(end): n can be any nucleotide: a,g,c or t/u
aagtactatgttcagaaattggtataaatcttttagaacacctgatgtattagcgagtacagatga

SEQ ID NO: 3911 - DNA, 81 bp, Listeria monocytogenes 4b specific
  misc_feature (1)..(end): n can be any nucleotide: a,g,c or t/u
tctatcacaaaaacacctgtggaaccaacaaaaattgaaaaagatcctgaaaatagagcgacttccgttttgaaagcaagt

SEQ ID NO: 3912 - DNA, 110 bp, Listeria monocytogenes 4b specific
  misc_feature (1)..(end): n can be any nucleotide: a,g,c or t/u
tgtatacaaaaaaagataacacggtgtgattgtgttatctttttactttgtatgcgttgctggttgatagttctttttgtttctgaactgagaattgatttcttcgagtt

SEQ ID NO: 3913 - DNA, 964 bp, Listeria monocytogenes 4b specific; identical to SEQ ID NO: 2928
  misc_feature (1)..(end): n can be any nucleotide: a,g,c or t/u

SEQ ID NO: 3914 - DNA, 54 bp, Listeria monocytogenes 4b specific
  misc_feature (1)..(end): n can be any nucleotide: a,g,c or t/u
gcctgatagtcaaccgagcaccatgctcgagcggccgacccctgtgctggaaag

SEQ ID NO: 3915 - DNA, 77 bp, Listeria monocytogenes 4b specific
  misc_feature (1)..(end): n can be any nucleotide: a,g,c or t/u
gagaaggcagcgggtagcagctacttatgatgagatgtgaatggactcctcagtcatgatgaagggattacctttga

SEQ ID NO: 3916 - DNA, 53 bp, Listeria monocytogenes 4b specific
  misc_feature (1)..(end): n can be any nucleotide: a,g,c or t/u
gcctgtcagtcactctgagatgctgcttgagcagccgccagngngctggaaag

SEQ ID NO: 3917 - DNA, 286 bp, Listeria monocytogenes 4b specific
  misc_feature (1)..(end): n can be any nucleotide: a,g,c or t/u
ttgtaactgcttaacaattgatgttagaggcgagtttgagatttgtccgatatgtttctgggaagatgatgcttattttgtctttgataaggaagagatttattctcattatcaaggcagttcctcgatagaagatttgttaaatattcgttctagcgctaacactacttacacattattctaaccctgtatagagaagccacggccaaaatttttaacccccagtttggcccttggtagaccttggcatatgaaaaaaatatggtaagagaagccactggcagag

SEQ ID NO: 3918 - DNA, 388 bp, Listeria monocytogenes 4b specific
  misc_feature (1)..(end): n can be any nucleotide: a,g,c or t/u
acgtgagttttttaataaagatatctctaatgaaaaaaatttaaatggatattatattgtccgcgagaatgattttgtttataatcctcgtatttcgaattatgcacctgtggggccaattaagcgtaataaactaggaagaattggtatagtctctcctttgtattatgttttcagaacatttgatacaaaccaaagcttcttggaatattactttgatgggacagtttggcataattttatgctattgaatggtgattctggggcaagagcagaccgatttgcaatcaaagattcagttttaaaagaaatgcctattccatattcaactttatatgaacaagaaaaaataagtttttttttagatgagataactatcattataaat

SEQ ID NO: 3919 - DNA, 33 bp, Listeria monocytogenes 4b specific
  misc_feature (1)..(end): n can be any nucleotide: a,g,c or t/u
ctacagctgctgagcgccgacatgtgctggaaa

SEQ ID NO: 3920 - DNA, 375 bp, Listeria monocytogenes 4b specific
  misc_feature (1)..(end): n can be any nucleotide: a,g,c or t/u
tgtggggatcattagattgttctgcagttattaaaaatggaacaaactcaagcattaaagaccttagctttgaagttagtgtagaggataatgcaatatctggaaagacatttctaaatagtgaagcactaccacttaccaaaactcagataggagattttgaacccaatacgggagtgccaatagttatagcgtttccagaaaagaacgcgacaggtgagggtgaagataagaaaattgacactaaaaatgtaaagattcatattagtaatattcaatataaagtagaaaagtaatttcttattatcgttttgaaaagttaaggatttacatggcatcaattgacaaaaaaggagacttatagtgaaaatagac

SEQ ID NO: 3921 - DNA, 700 bp, Listeria monocytogenes 4b specific
  misc_feature (1)..(end): n can be any nucleotide: a,g,c or t/u
aacccacctcattgataaattgccgtccgggggaatctgccaaccgacaccttcatgcaatgaagttaacaagaaagccagtgggatgaatcttgattaatttcataacgctgctaacatagtcccgaactcaaaggttacaccaacaaaactattgctaccagaaccatgtgcagaaaaatggcacgccgctaactaataagccattgatgaacttacatagttaggagtaactggacgatattacgcttacccggatagcctatctgcgtgcagaaacccaacttggatgtattgccacaactctctacttcgaccgcgttgatattataacggagcaaccaacccctggcttggatgcgcaccggggtctcgatggaaataccatgtatgcccatgtagtggcacgcagaattaaacctgccatcatgggatcgcacgaagaacaagaccaatacctatacgaacaattcattacaattcaaaattgctattttatgctaacaaaggattggcactttctaataaatacgtattagtaataccaagcgtccctccaacagaatatagccagtatcgaataatgtgtataaatatattattaggatacattaaaaaataattctgcgttgttgcatgccctccattagaaagcatattcaatgcttctccctggataagaaaagcatctgcatatgaa

SEQ ID NO: 3922 - DNA, 57 bp, Listeria monocytogenes 4b specific
  misc_feature (1)..(end): n can be any nucleotide: a,g,c or t/u
gccagtatctgtacccgagcnctatccgtagtacaggccgccagtgtgcttggaaag

SEQ ID NO: 3923 - DNA, 191 bp, Listeria monocytogenes 4b specific
  misc_feature (1)..(end): n can be any nucleotide: a,g,c or t/u
cgacatgtccccgaaggtaaggactccgtatcgttttaagattttagtttaggggctgagagtgctcaatatttagaggtaatcaagacccacagcatatttatagcctccatagttattttcttgttctaaaaaaccaaaaaccagttacccaccaaactcctggcgtaactggttttctaaatctcacc

SEQ ID NO: 3924 - DNA, 53 bp, Listeria monocytogenes 4b specific
  misc_feature (1)..(end): n can be any nucleotide: a,g,c or t/u
agaataacatagagtacactctatctgcattttcgagcggccagccagtgtgc

SEQ ID NO: 3925 - DNA, 694 bp, Listeria monocytogenes 4b specific; identical to SEQ ID NO: 2992
  misc_feature (1)..(end): n can be any nucleotide: a,g,c or t/u

SEQ ID NO: 3926 - DNA, 20 bp, Listeria monocytogenes 4b specific
  misc_feature (1)..(end): n can be any nucleotide: a,g,c or t/u
gccaccagtgtgctggaaag

SEQ ID NO: 3927 - DNA, 53 bp, Listeria monocytogenes 4b specific
  misc_feature (1)..(end): n can be any nucleotide: a,g,c or t/u
ttaaagatttatctattaaaatcgctgaaaaacccggataagcgtacatttaa

SEQ ID NO: 3928 - DNA, 737 bp, Listeria monocytogenes 4b specific
  misc_feature (1)..(end): n can be any nucleotide: a,g,c or t/u
aacttgcttatagggaactggtacagcatgttcgaggggccaccagtgtgctggaaataatacactttggaaagttaatgcaactgttattttgtggaatgcctttttgcttgcagtattaactaatgccttaaattatgcaaatggtgttattgtaatgaattcccaaatagtacaaatttacatttattcttttatattatttggtttaggtttagttcttgtaggtgttttacagaatatgggacttgtaattacaagtaataaggcaattgctttttttgtagtatttctggtatttttctttgatactagcacaatcaaattgcagctaatttccaatctgtttatagtgaaccctaatgatcttactgacttgttgtcatttgctgggcgagttttctgcttggttggtgggattattgtattatttttaataagttggttacttacggagaaaaaagatgtgtttcgaacctcgaaaaagaaggtgcgttaatatgtggttattttttaaacgggatgtctcatggttccttcgccggcatcgttgggcaattattggctcgggtttgctctgggttttttcggtgccgtcgctgtcgcccttccgcgtttcgctgtgcccccctctccgcttttgcgggcgctgtgtcctctcttcgccgccctttccgtccgtttcgccgggccgcggggcgggcggccgccgccctgtcccaccgctaaaaacaaca

SEQ ID NO: 3929 - DNA, 48 bp, Listeria monocytogenes 4b specific
  misc_feature (1)..(end): n can be any nucleotide: a,g,c or t/u
ttttcagtaacttccacgctgcttgatcggccgacatgtgctggaaag

SEQ ID NO: 3930 - DNA, 34 bp, Listeria monocytogenes 4b specific
  misc_feature (1)..(end): n can be any nucleotide: a,g,c or t/u
atctcatactctaatttttatactcatgtcacgc

SEQ ID NO: 3931 - DNA, 74 bp, Listeria monocytogenes 4b specific
  misc_feature (1)..(end): n can be any nucleotide: a,g,c or t/u
ggttatttgttggcacaataatctgcttcgtcacttcgtcgtaatccacttttgccacgttgtaaatttccttc

SEQ ID NO: 3932 - DNA, 762 bp, Listeria monocytogenes 4b specific
  misc_feature (1)..(end): n can be any nucleotide: a,g,c or t/u
cgtaaatactcggaggtgcaaaatgaaggttatccattgggggggtgaaaatgcggactatggctgtttctctaatttctctttacatccaattgtcatagacggcgtgacttacccaaccacagaacactatttccaagcacaaaaatttatagataaaaaaattattaaaaaagtaattaatacgaaaaaaccaatagatgcagcaaaattgggtagaaatagagacttcccactgcgaaaaggctgggaaagtatgaaagacgaagtgatgttaaaagcaatcagagcaaaagtagcgcatcattcggaagtgaaagaaatgcttttatccacagagaatgctattttagtggaacatacggaaaatgatcattattggggccacggcggagaccgctctggaaaaaatcgtctaggcaagattttaatgaaagtcagagacgaatgaactctaaatagtgggaggtagcttaaatggaaacaataaatcatttttttgaatgggctaaaaataataattggcaagtagatttgtctgctgtagagaaaaacttgccagagcagattttaaagaggtatggaaagttgccagatgcttataaggctttttatagacaacttaacctctgtagcaatgcgggtgacacttgttggtttttatcggaagaagattttttagagaatgaggttgacgccttttcgtggaattcttttgaacaaatgagtttagaagcagcagaaggcgatacaaacttagaa

SEQ ID NO: 3933 - DNA, 85 bp, Listeria monocytogenes 4b specific
  misc_feature (1)..(end): n can be any nucleotide: a,g,c or t/u
tgccgtctccgcgaggtatggtgtgtgctccacggcgctctcgatcatctactagtggcacgataggtgatagaccttctgagaa

SEQ ID NO: 3934 - DNA, 78 bp, Listeria monocytogenes 4b specific
  misc_feature (1)..(end): n can be any nucleotide: a,g,c or t/u
gaatccacaacacaaattgaaaaagtagtacatgttgataattacgatttaaaattgaattaactgtaaaaaacttca

SEQ ID NO: 3935 - DNA, 180 bp, Listeria monocytogenes 4b specific
  misc_feature (1)..(end): n can be any nucleotide: a,g,c or t/u
accaatcacttccatatcttcattcccaagttgattattattcaagaataaagaattcaattgggaaagattatttagaacagatatatcactaatttggttactaccaacattcaacatttttaatttagttaaatctttaaccgcattaatatcgctaatttgattggaaaagatttc

SEQ ID NO: 3936 - DNA, 103 bp, Listeria monocytogenes 4b specific
  misc_feature (1)..(end): n can be any nucleotide: a,g,c or t/u
actggtcccgagactggtgcctaacacggccgacagtgtgctggaaagatgtgcacctgttaacatttaggattaaacaactactactactctcgtcgcgatg

SEQ ID NO: 3937 - DNA, 276 bp, Listeria monocytogenes 4b specific
  misc_feature (1)..(end): n can be any nucleotide: a,g,c or t/u
acattattttattctacaaaaagcctctttcaatcaaaagtctataacattagaaaaaaataactcccccgcttaatttcttcccagtgagtaaaattttaatagttagaggatgaatataatcttattatattcgctagttcggctttagtctagtgtcattttcgaacaactaattatttagaaagtattatcaaaaatagaacagatttcttttaatttattaaaaaaataaagctgtctttctcctatgttccaggaaaaaacagctttatt

SEQ ID NO: 3938 - DNA, 466 bp, Listeria monocytogenes 4b specific
  misc_feature (1)..(end): n can be any nucleotide: a,g,c or t/u
ccttcgaatatgggcttaatgcaagttctaaaacatatgatggagaaaataaatatattcgaattacagatattgatgaaagttctcatgtatttaatcaagataatctaacctccccagatataagtttagataacctaaatcattacttattagaagagggtgatattctcttagcgagaacaggagcaagtactggaaaatcttattgttacaataaaatagatggcaaagtattttttgctgggtttctaataagagcaaaaatcaaacatgaatataatgtcagttttatctttcaaagcactttaacagaaaggtataataattttattcaggttacttctcagagatcaggccaaccaggaattaatgctcaagagtatgctagatttgctttatatattcctaaattaaaagaacaacaaaaaataggtgactttttcaaacaactagacgacactat

SEQ ID NO: 3939 - DNA, 49 bp, Listeria monocytogenes 4b specific
  misc_feature (1)..(end): n can be any nucleotide: a,g,c or t/u
ggtaccgagccctgcaccgctagtcacggccgacagtgtgctcggaaag

SEQ ID NO: 3940 - DNA, 125 bp, Listeria monocytogenes 4b specific
  misc_feature (1)..(end): n can be any nucleotide: a,g,c or t/u
ttcgcgttactaaatatggtatccattttagtgacggaacttgtattgagtccactcacatcaagctcactaagtttacgacataaggtaaacattctacttatatttgttaaagaaggcgtctc

SEQ ID NO: 3941 - DNA, 677 bp, Listeria monocytogenes 4b specific
  misc_feature (1)..(end): n can be any nucleotide: a,g,c or t/u
cgtgtagccgaggggggggcggggggggcggcgccggactgccccgggtgcggagggaaagaagggcaggacagagaggaaggtcggggggcagacggggccgggaacgcggagggggcgcgggcgtcgtcccgtcagggtacatggcggggcggaggcagcggggccgcgtacaccacgccagaaatgtacgatctcctttcaaattacgtcgccggggtagacccggcggtggtcgccatgtggtagcaccgggctggaatggcggggcggatgtggcggcgatttttactagtgcgattatggggtcagtagcagcattttggatggatggatcagctggtttcttaatcactatctgtgctgctgcaagatgtcgaaaaatcgtaggaaaaccagttctagctgcctctgtgctattattgatattccctcttcaattctttccctttattttattaactgcatttatagtgaatagaacttggttagttaccttcaaaatgacagcataacgcctaaggagaaatccttagtttttttatgctgatttttttatatagaatcttccttttttttcttttaatacttcctgtatcgaggagaagtattatttttccgtttagtgttggcgagaattttgccgtatttcgccattttatctattatatattaag

SEQ ID NO: 3942 - DNA, 44 bp, Listeria monocytogenes 4b specific
  misc_feature (1)..(end): n can be any nucleotide: a,g,c or t/u
accgtagttaaatttacaataggcttgagttctaggtataatat

SEQ ID NO: 3943 - DNA, 879 bp, Listeria monocytogenes 4b specific; identical to SEQ ID NO: 3096
  misc_feature (1)..(end): n can be any nucleotide: a,g,c or t/u

SEQ ID NO: 3944 - DNA, 182 bp, Listeria monocytogenes 4b specific
  misc_feature (1)..(end): n can be any nucleotide: a,g,c or t/u
tccacttatgttaactctggaaatgcttcttggatgcgtgtttgcaagccaagattagaaacaaaaaggaaaattttgatgcacggtgtttaagccagtatattttgcacgtagcaaaaaactgctagcgtcttaaacctcggatacggaaggttccattgttttcgcaaccataattaaca

SEQ ID NO: 3945 - DNA, 831 bp, Listeria monocytogenes 4b specific; identical to SEQ ID NO: 3069
  misc_feature (1)..(end): n can be any nucleotide: a,g,c or t/u

SEQ ID NO: 3946 - DNA, 1523 bp, Listeria monocytogenes 4b specific; identical to SEQ ID NO: 3018
  misc_feature (1)..(end): n can be any nucleotide: a,g,c or t/u

SEQ ID NO: 3947 - DNA, 735 bp, Listeria monocytogenes 4b specific
  misc_feature (1)..(end): n can be any nucleotide: a,g,c or t/u
cgtagaacggccgccgtgtgctggaagccagtgccatcgttattggaaaggccttaccgctgttancaaaatataagaacatacatctgaaacaattattttctgtgcactcaatccaaaatattctaatcttttatagcttttattttgaacactttcaccaagccagattggaaaactgattaatgctattggtaacatgcgcatccctgtactaatcaaaaaatatttatctacaaaatgataaccttcaccaatatcaaagtttccataagaagtaaccatagcgaacatcatgattagtggaaataataatgagaaaaacacagatactggaattctaaattgcattttaatacttgtccataaataactcattatatcagtacctcctgttcactgcttgatgttccgcgcaaatatgcaactaaataagttgtatatatattttgttttattgtgttgtatgtgacgttttttttatccaaaattttctttgtctcttcctgaatttgcaaatccgaacaaataactgctatcccgtcacctgtatctgtgctttgcataaaagtcatatctgtttcatctatctttgttagttcgatttgatctactttaataacagaataatgaggaaaattagagaaaaattctgatattgttccccacaaagtaaattacttcctgttagtgaaaattaaatttctgtggccacattttaaaaacttcataaaa

SEQ ID NO: 3948 - DNA, 64 bp, Listeria monocytogenes 4b specific
  misc_feature (1)..(end): n can be any nucleotide: a,g,c or t/u
gtactcttctcagttacgtaccgagctctgatccgtagaaccggccgccagtgtgctcggaaag

SEQ ID NO: 3949 - DNA, 494 bp, Listeria monocytogenes 4b specific
  misc_feature (1)..(end): n can be any nucleotide: a,g,c or t/u
cttacaattctacgctattcattgcgtcttttggtgtaccaaagaaataagttaaaatgaatccacctaaatatgctgcaattaatccgatgacgtaagaaagccattcattattcgcgattagtgggataagtgcaactcctgatgggccgattgcaattgctccgacgttaccaaagtagccgattactgccccaccgataccgcctccgagacaagctgtaagaaaaggtttcccaagtggtattgttaccccataaattaatggttcaccgatacctaaaattccaaccggtagaccccctttaatcatatttacaagtggtttatttttacgacaacgaatccaaagcgcgattgctgcaccaacttgtccgccacctgccatagctagaataggaagtaagatagtataaccattttgagcaatcatttctacatggatgggtgttaaaacttgatgtaacccaaacataaccattggtaagaataac

SEQ ID NO: 3950 - DNA, 974 bp, Listeria monocytogenes 4b specific
  misc_feature (1)..(end): n can be any nucleotide: a,g,c or t/u
tgatatcttcaagtacaggttccccttcatcatttttcatcgttaaaagacctgtcacattttcaaaaaggaatactttaggctgtaagaaggaaagcattcttctgtattccttatacatcgtagccttttcatcatattgcctcctaccaactgtactgaaggattggcagggagggccacctattactaaatcaatattagaatactcaatctcatgattatctaaataatcctcggttagttccgttatactacaatttaacattggaatttgtgggaaatttagagagaaggcttcagatgcgtgtttatccacttcattagcaaataaaatattataatcagacataggtaaaaaggtgttatttataattctattctgaaatcctaatgtcaaaccccctgcaccagaaaataaatctacaactctaatcataattatgtcctcctaaatcttctcatacgatacattttatcaaaaacccacaaaaattgatataaattattgatcttagtatatctcattttttcatcttgcgatttctcataaatgaaaaaaattttaactaacttttaatttttcattattaaaaagtgatattctttttatcaataaacaaaagattacagacatttgagatataggcatgatattttgagtttacctctcgttgataaagactttacttccccttaatttattgtctcttaataggttaatacctctaaaccctgacctacaaccatcttttagaaaactggatttagtgatacctttgcttacaacaaacattctaaccatctggataattttgatagcctttgtttattttacatttctatatctttatagtttatattataccaattgagaaaaaatcaaagtctattaatataactaatctaacgacgaaaatgaccaaaaagtgaaaaaatttaaaacttctctgtccaggatatagtcaaaatag

SEQ ID NO: 3951 - DNA, 103 bp, Listeria monocytogenes 4b specific
  misc_feature (1)..(end): n can be any nucleotide: a,g,c or t/u
ctttccagcacactggcggacgctctagcatgcatttaaagggcccaaagggcctatgcggaggatcgttgcaataaactggacgtagccagtcaacaggacg

SEQ ID NO: 3952 - DNA, 100 bp, Listeria monocytogenes 4b specific
  misc_feature (1)..(end): n can be any nucleotide: a,g,c or t/u
tgaaagtcattacttttggttattttgctacttctgcatttacaattcacaatgagtaagtaaacaatactacacgctattgttgttttccaaaggaacc

SEQ ID NO: 3953 - DNA, 647 bp, Listeria monocytogenes 4b specific
  misc_feature (1)..(end): n can be any nucleotide: a,g,c or t/u
gcgctggaaagatggtaactctactctttgaatccaattataatacatggtttatccgcgggaagatgaataacgggtgggaaccagaaacagagaaagatcgagaaatattgttagaaaaaggcgtcattttaacagaggtatagtatataaatccaattcgaaagggactcaataaaatgaattcaaatgaaatttcagagattataattcagcagaataaagggaaaacaattattaaattgctttataccttgcctatattattatttggaatttttattttatttaaagtaaaagaatcgttattactaggtgcttgtggaataatccttttagttatcgtggcaccaacttattttaccgtagctaagcattttttttcgggtaaaccactgcttaaagtggatcaagatggtattgagggatggagtaaacgctttaagtggaatgaaattgaaaaagtagccttgcgtagagactggggcgccgtatatctgactgtatatgtacggaagaatggcggaattcacaaatataatataaatacaaaagaaatagaacgttctgccacagaattaatcaaacaaataggttatttaaaaaacaaatatgaatgattaattgcaaggtttaagaaacagtgg

SEQ ID NO: 3954 - DNA, 1215 bp, Listeria monocytogenes 4b specific; identical to SEQ ID NO: 3085
  misc_feature (1)..(end): n can be any nucleotide: a,g,c or t/u

SEQ ID NO: 3955 - DNA, 822 bp, Listeria monocytogenes 4b specific
  misc_feature (1)..(end): n can be any nucleotide: a,g,c or t/u
tccatactttaacagctaaattaatataatactgtcagcttaccaattacggtggttctcatatttactagtacgaactatataaactaaaaagttgaaaatacagtgaattattattgtcaaaaatatatttagtgttaataaaaataatatacttaatataaaagaaaatagtattttgacaattgaagacactccttgataaaaaatatgtgcaatcacaaatgaaaaggtggctagtaatatatactggatattactgaaatcaaataactcacagtattgataaataaaaaaacggaaaattatttcttctaaaacaggaaaccatacaatagattggataataattttattttttttataaatagtaagcaactttttccattgtctctcaacaaatatatattctacaaaaaacagaataaatggtaagaataaaatacatatcagcgataaaactaccacaaactgttgacggaaaaacaaactattcataattgtgatcaagaataaacaaagtaaatattgaaaaaaagtactctttctagatagaactggaatccatttcgtcaataaaagaagcatacctggaaataatgtgattaaaaaaaagatgttatgcaattggatgtggaatattatttaccacaactcccaatctctatatatcttacatggtagtgaggtggatatgaaagaagatgaaatggatacagttctggaagaatcaccctgcttatttcacaattcatatatctaaactctgaaagcgtgataggtaagattgcancatactgactatacgaggcatcgtgggca

SEQ ID NO: 3956 - DNA, 775 bp, Listeria monocytogenes 4b specific; identical to SEQ ID NO: 1540
  misc_feature (1)..(end): n can be any nucleotide: a,g,c or t/u

SEQ ID NO: 3957 - DNA, 788 bp, Listeria monocytogenes 4b specific
  misc_feature (1)..(end): n can be any nucleotide: a,g,c or t/u
gtttaaaaatgagcaagatgagtatagttttagaataaagtcagataaaattttagttgaataaatttctagtttaatttttgtgtattgtttagtcagtatactacaataaaaggggagaaagctaaaaaatgaatactttgtattatagggtgtctaaaaatacaaattttgaaacagcagcaagagagatttttgatttattaatagaaactcaacaacaatttgagaatcaaccgagatttttaaaggtagaaattgatggacatttaaatgagttaaatgagtttgataatgatatgcttaaacttcaacaagaatttggagaaatttttttactccaattctttaccacgattagtttcccattgcttacaaagaaaaatcctagaaagcttataaacgatataccgaatgacctaacaatttatgatttgaagtatggaaatccagcatataaacttcaaattgaaaactattataatactgaatttgttttagaaaaagatgtgtatgtattcttggaaaaagtttctaacctcctaaagaaatatggaaaaacagataactataaaatcaatattgagaatgaggagtatgataaacttggcttattgattcactggcaatcttatatgaaagaattgatagtagaactatttaattcttttgtaaacggtaatttaatttcgaatgctgcaatgactaggtcacttattgagggttatgtgtatttaagtattataaacaacgaacgaaatccattgttagttcaagattggtttcta

SEQ ID NO: 3958 - DNA, 49 bp, Listeria monocytogenes 4b specific
  misc_feature (1)..(end): n can be any nucleotide: a,g,c or t/u
aactgtgggcactntaccgctgcctgnacggccgaactgtgctggaaag

SEQ ID NO: 3959 - DNA, 360 bp, Listeria monocytogenes 4b specific
  misc_feature (1)..(end): n can be any nucleotide: a,g,c or t/u
tcggaatatcggtagatgctttttataaataacatatttttatcaaaattaataacgaatttaaatgtcgtatggaatactaacggagacttgccatgcaatcacttgtattttttgtgatttgcccagattagtctatctgattctaatgttctggagatacagccatctctgttttgaaaactagtatagtcaaatcaacgcaaacagaaaaattagtaccaacaactatcgcagtggtaggattcatagttattataattattcgtaaaaataaataaaaaactatctactcaaaattctcgagtggatagttttttatctatannatagcttataaaaaaattatgattncatttc

SEQ ID NO: 3960 - DNA, 68 bp, Listeria monocytogenes 4b specific
  misc_feature (1)..(end): n can be any nucleotide: a,g,c or t/u
gctttatgaaatgacaactaaaatatcattttggattacttataatttgttttttttgatgtattaat

SEQ ID NO: 3961 - DNA, 444 bp, Listeria monocytogenes 4b specific
  misc_feature (1)..(end): n can be any nucleotide: a,g,c or t/u
aacttctaagcctttcaaaggaacaaacatttcgcttggaatcgctcttttcatttcctcctcttgaaactcgactggagttacgtaaccatagacttgattttgatagaatccagctaagtacttttcttccaaactagcaacaatatcaaaatcttccgcataccaactgcttttttcaaccatctcttctctcgtttcaaattgataagcaaagtccggctccacaacattaaagccgttcctttatccgttttcgtcgaattagcaatccaatgaatcggtttcttcggattatcaaaattccattctacaaccacttgatgaatctcttcaggcgtacatttttctaaataattaataaacaactccgaaacctgttcttcaaattcttcttctgtaatactcatttgatgatctccttttcatgctgtcatttaagca

SEQ ID NO: 3962 - DNA, 766 bp, Listeria monocytogenes 4b specific; identical to SEQ ID NO: 1472
  misc_feature (1)..(end): n can be any nucleotide: a,g,c or t/u

SEQ ID NO: 3963 - DNA, 88 bp, Listeria monocytogenes 4b specific
  misc_feature (1)..(end): n can be any nucleotide: a,g,c or t/u
taaaataaaaacagttattttctgcttaataaagtagagaataactgtttttttgtagttgcgatgttgtttacaaaggtaaagtcaa

SEQ ID NO: 3964 - DNA, 109 bp, Listeria monocytogenes 4b specific
  misc_feature (1)..(end): n can be any nucleotide: a,g,c or t/u
gagaatttagcaaacgcaataaaagcaactttaaataaacctagtactacatctgacgtttcacaagcgtgtgctagattctataagtgaagccacggctgaaagtagc

SEQ ID NO: 3965 - DNA, 373 bp, Listeria monocytogenes 4b specific
  misc_feature (1)..(end): n can be any nucleotide: a,g,c or t/u
tcctgtagttagtaatgagagcttactttcccactcagtagtgaagatattatccggaagcgtaattagctcattatagcgtacatccagcgatcctaaatgaggggataatgtggttatttctgaaggaatctctttaattttatttctatttatctcaatagaacttagagaaggcatctgtaatagaatcatcggaaattcttgaaaattattattgtctacgttgattcttgttagttttgttagtttagtgatactagttggaatttctgaaatcgttccattaagggcaagtaaagtattgagattcttataatcagaaattttgtcgggtattgatgaagcatcaccataaatatctaattcttgt

SEQ ID NO: 3966 - DNA, 676 bp, Listeria monocytogenes 4b specific
  misc_feature (1)..(end): n can be any nucleotide: a,g,c or t/u
acctcatttgacattgttaaatatttagtttaaggtgtttttgtataactggaaattaataaatagttccattaaaagctatatgcaagaaatttttcaaggaggagcaaaatgccaaaactcgttacgggatatgagcgtcaacaaactataaacctaattatcgaacatacaagccatttaatttatataaaaaaaggaattcaaggttttactgtggaggatattactcgagcagctaggattggaaagagaaaattctatacgtgttttccctccaaagaagcatgcctatttgaggttgtggaatattcctatcaagcacaattagaggcatttaaaaaaattatggaggagaaaggttcgttaaaaagcaagatgactcgttttttgaaagaagtctatctttcggaaaagagtataaacaactacttttcaccggaagatttccacgcaatactccaaaaactccctccaacatatacggaaagagaagaaagaatgacaagtgaagtcctggaaactgccatgacgtatatcgatcaaacgagagctcaatgggaggctttagtgatgttactagattgtttaacttacactgcgacaaggagttatgtagaaactgccaaaaaagcgaaagaagagacattggatatattaatacattctatagctg

SEQ ID NO: 3967 - DNA, 68 bp, Listeria monocytogenes 4b specific
  misc_feature (1)..(end): n can be any nucleotide: a,g,c or t/u
cgttgcctttgaaaggactcagttactgacctgctctgaccggtatacggccgccatgtgctggaaag

SEQ ID NO: 3968 - DNA, 690 bp, Listeria monocytogenes 4b specific
  misc_feature (1)..(end): n can be any nucleotide: a,g,c or t/u
atgattatgactaagattcgggaatttggaataacagatccgatgatttagctagtatccctaaagcgatatagtaaatgagcaaaaaattagaaggattgaaactgatacaagaagggtagcttcggaatataaaatagagttgcataaagataaaacaggactgtatttatacgagaatgataaaatttttgacataattagcaatgaagtaagccatttagattatttaggtttcgtttttgatggcactacagttaaaatgagagggaagagtccgtataaattttaccgaaatgcaaaaaaacttataacgtttgctcagaaagtaaaagtaaaaaaagaattgactgatttaccttataagaaaaaaatttatggattgtgtacagatttaggaaagaattataataatcacggtaactttatttcatatgcaaaaagagctcaaaagaaatttgatgaaatatctccaaatacaaataatttaataatgaatcaactaaaaaatcgaaaaaagaaaatcgaaaagatgctaggttataaaatacatactaagatttaacttaaaggtattttttattatttatggggaaaataccttagtgaataaagctgctcaaagagtgaatagtagtaaaaataggtaagttactcgtcgaaaggaattgtatatctgtggaaacatcc

SEQ ID NO: 3969 - DNA, 86 bp, Listeria monocytogenes 4b specific
  misc_feature (1)..(end): n can be any nucleotide: a,g,c or t/u
ggtctttcctttgaaaggaactccgttacgtatctgctctgaccgtagtacggccgccatgtgctggaaagcaaagaccatttgct

SEQ ID NO: 3970 - DNA, 813 bp, Listeria monocytogenes 4b specific; identical to SEQ ID NO: 3148
  misc_feature (1)..(end): n can be any nucleotide: a,g,c or t/u

SEQ ID NO: 3971 - DNA, 237 bp, Listeria monocytogenes 4b specific
  misc_feature (1)..(end): n can be any nucleotide: a,g,c or t/u
agataaaattcacaaaaatgacacgaaatagaactatatccgcaataatagtatttttgttaatacattggcttgttgttttgtatattataattattctaaatcaagttgctaaaatacaagatacaaggagtgctatattttttgaaaaaatttgttttaatttttatttgttttctcacgctaacaaccattgtcccttggaatacgctcgaaacgaaggcggcatccacttct

SEQ ID NO: 3972 - DNA, 91 bp, Listeria monocytogenes 4b specific
  misc_feature (1)..(end): n can be any nucleotide: a,g,c or t/u
gaaagaaaagtctaggttagcacctagacttttttactatgttagagtatttctatagattgcgatataattaaactatataaaaatgata

SEQ ID NO: 3973 - DNA, 875 bp, Listeria monocytogenes 4b specific; identical to SEQ ID NO: 3214
  misc_feature (1)..(end): n can be any nucleotide: a,g,c or t/u

SEQ ID NO: 3974 - DNA, 64 bp, Listeria monocytogenes 4b specific
  misc_feature (1)..(end): n can be any nucleotide: a,g,c or t/u
gtcttacctttggacggtctttagtaaccttacagctgtgcgagggccaccatgtgctggaaag

SEQ ID NO: 3975 - DNA, 625 bp, Listeria monocytogenes 4b specific
  misc_feature (1)..(end): n can be any nucleotide: a,g,c or t/u
gattaatgcatagaaaagagggagcataatgaaaaaaaggttaataggtattattacagcattattgttagtaagtgggattttgctatctccgcagatggctcaggcggaaacaaaagtggattatgacgcattgtatcaacagggagtatctgaagggattattaataaagcagatgtaagcttagaaacatggataaaagagaatgaaagtgagtataatcaagtctatcaagatggtttaaaagatggtgtctatgatgcatcattgtcgtatgaagaatggataaagttaaacaactatggacaacctcctgtagtagatgaaaattgggaagaagttccacagaagccaatgcttaaaggtgtgtataaaggttataatattaaaaaaggggacattctgattacaaaggtgacatcttcttccggattattgggacatgctgctattgcgaatgggaatgagtatatattagatattcctggggctggaaaaacgacaaggcaagtacctacaagtaaatggatgagtgattatgatccagaaggatgggtaaaagtttatcgcctgaaggatagttctgttgctaatgccgcagccaattgggcggacaaaaactat

SEQ ID NO: 3976 - DNA, 622 bp, Listeria monocytogenes 4b specific
  misc_feature (1)..(end): n can be any nucleotide: a,g,c or t/u
ggtttagcatatgtgtttattttgttcagatgattctctatagaccaaaacctgttttctaattctatggctgattcataatatgttttttcaaataaaaccatttatttcccgctttctatctcaccatatttcttagaaaataactataattcaatatgatagtgagaacataatatccaaccgtttaacccatatgaagcttgtaactcataataatttaattttttctcgtttaaataatttagtagttcgtcctcactttcataatctagtggccaaaaatagtttttgccttcagaaagtaaaattgacttctcacttataaagctgctaacctctccttttactatgtctaaaatgatactattagacatttggtgttcaaagcagaaagttaaaagcccctcaaatatgactttatattttctgttttcttcatccttaacaaacatgattaattgagaattctcaaaatctgcatgataagacaatatttcgctatcatgaactgtatttttcataattaacactccttatttagatggctttcttggcggttttctatcccaatcccactcatgtctatgtggaaattcgtgagttccgtcgtctgaatgtt

SEQ ID NO: 3977 - DNA, 1313 bp, Listeria monocytogenes 4b specific
  misc_feature (1)..(end): n can be any nucleotide: a,g,c or t/u
ctcaatggttcagaaattagctctccagcttcaagagattctgtcgtttgtacatcatccacatcaaatgtcacattcgaaatcgttggtgctagtggctctacgatatgcacctttacttctacagggattgcttctactnnnnnnnnnnnnnnnnnnnnnnnnnnnnnnnnnnnnnnnnnnncagtgctccatattacagccgtagcgaaatcactttcaattggtgaaccatcactcgttttagcatgaatcgctgcaagaaattccgttatgctgacttccgcgtttttagcgtacgtgatttctttatctgcggtaattactggtgctggtgacttagcgatgtgcacagttacttctacagggattgcttctactccgtcttcatttgtagaccttagcgttacggtataacctcctacagtgccccatgttacagccgtatctaaatcagcttcaattgatgaaccatcactcgttttagcatgaatcgctgcaagatattccgtgatgctgacttccgcgtttttagcgtacgtaatttctttatctgcggtaattactggcgctggcgacttggcgatgtgcacagttacttctacagggattgcttcaactnnnnnnnnnnnnnnnnnnnnnnnnnnnnnnnnnnnnnnnnnnncagtgccccaatttacagccgtagcgaaatcactttcaattggtgaaccatcattcgttttagcatgaatcgctgcaagatattccgtgatgctgacttccgcgtttttagtgtatgtgatttctttatctgcggtaattactggcgctggcgacttagcgatatgcactaatacagtcaccgaagtcgcttttactccatcctcattcnnnnnnnnnnnnnnnnnnnnnnnnnnnnncgcttttgcaaagtccacaacactttcaaaatcagaagttagtgttgcatcatccnnnnnnnnnnnnnnnnnnnnnnnnnnnnnnnnnnnnnnnnataccgtttcgtttttcgggtaattcatctctgcatctgcgctaataactggtactttagatgctttgattggttgtgtcactttccccgaaaaagttccttgaatagttgcctcttgaacaggttcactaaattgataatcagcggcattcacgctttttatatcttctaaaaagccgacttgatttcggttattttagatagtgttcctcttattagagactggatttggcagtggttatttgaccgaaattcttcacttcattatcaagaactaggtctgacacgataactttttgctttagagtgattgttt

SEQ ID NO: 3978 - DNA, 1939 bp, Listeria monocytogenes 4b specific; identical to SEQ ID NO: 3244
  misc_feature (1)..(end): n can be any nucleotide: a,g,c or t/u

SEQ ID NO: 3979 - DNA, 51 bp, Listeria monocytogenes 4b specific
  misc_feature (1)..(end): n can be any nucleotide: a,g,c or t/u
ccctgntggcaacgtggctcgctgctcgagcggccgacgtgtgctggaaag

SEQ ID NO: 3980 - DNA, 40 bp, Listeria monocytogenes 4b specific
  misc_feature (1)..(end): n can be any nucleotide: a,g,c or t/u
tggcacttgctgctgctcgagcgccgacatgtgctggaaa

SEQ ID NO: 3981 - DNA, 47 bp, Listeria monocytogenes 4b specific
  misc_feature (1)..(end): n can be any nucleotide: a,g,c or t/u
gcttaagtcacttagagctgttgagcgccgacatgtgctggaaagaa

SEQ ID NO: 3982 - DNA, 54 bp, Listeria monocytogenes 4b specific
  misc_feature (1)..(end): n can be any nucleotide: a,g,c or t/u
actttatgggaactctcgatgcatgttcgagcggccaccagtgtgcntggaaag

SEQ ID NO: 3983 - DNA, 66 bp, Listeria monocytogenes 4b specific
  misc_feature (1)..(end): n can be any nucleotide: a,g,c or t/u
gggtaacaagtgagatatatacactgataaattagcagcgtttaagctaaatttgttagtttgtta

SEQ ID NO: 3984 - DNA, 183 bp, Listeria monocytogenes 4b specific
  misc_feature (1)..(end): n can be any nucleotide: a,g,c or t/u
actaagatacttttagctagtaatctaatatttttttctattgcaaactgccaattagaaaccattagaaatcgataaaatttggcgataataccttttccactactttcgacgagatgattgatcaaaattaatatcgctgtatttagaataagcccctgtgacacagtgatagccttcagc

SEQ ID NO: 3985 - DNA, 1007 bp, Listeria monocytogenes 4b specific; identical to SEQ ID NO: 3315
  misc_feature (1)..(end): n can be any nucleotide: a,g,c or t/u

SEQ ID NO: 3986 - DNA, 46 bp, Listeria monocytogenes 4b specific
  misc_feature (1)..(end): n can be any nucleotide: a,g,c or t/u
ggattagtactatcatcattcttacattgttgattctatgcccgca

SEQ ID NO: 3987 - DNA, 228 bp, Listeria monocytogenes 4b specific
  misc_feature (1)..(end): n can be any nucleotide: a,g,c or t/u
gatttataaattattaaattctatctttgcaagtaagcgtttatcttatttactaacgacaccaatcagataaatgaacttaatttatatattaaaaagtatcgcaaatataacaataggctggaacatataggattctgaaaagcctcaagtgttccaacctattatttaatcattaatatttaacggaatttcttctttcttattttcggataagtcgtggtatgc

SEQ ID NO: 3988 - DNA, 744 bp, Listeria monocytogenes 4b specific
  misc_feature (1)..(end): n can be any nucleotide: a,g,c or t/u
cttcacttcatttcattataataaaaaaactgtaggcaaagtatttttatacttcgcctacaatctcagccgaaaagaaaggtgtcttttcggtttttatttatgatttttccaaagaaacatcgctgaagataatagtagaattcctgccaaaaagtcattgtatggattggaatcgccagtttttggtaagacagacgtttcttcttttattacgttggtactagaatctattttaataatcgggtttttgattggtggatttactattactactggtttatttttacggtagatataatcgattgattgtgcttccgccgaaaacacaccattagaatttgtaggagtttttatcaacgtgtagccatctatttctttagctagtgtattataagcctctcccacacgaccatttagaactacagagtcagcaatttctttaccattttcatctaaatagttcactgtcactggtaaggcggaaatagcaatcggcgtatacatataagttactgtttgcgcatttgttgtaaaggttccttttgcatttggaggtattgttgtgagtgtgtaaccagcaattgttttcggttgagttgagtaagattctccgatattaccagttaaaacctcacttttcgcgattttttgacctgtagagtttctataattaacggtaataggttgggctgtctcagcgtttttcgcatagatataattaattatttgaggttctgtcga

SEQ ID NO: 3989 - DNA, 418 bp, Listeria monocytogenes 4b specific
  misc_feature (1)..(end): n can be any nucleotide: a,g,c or t/u
gaatagaaaagataatgatatcactaatattcaatacaaaactaattttgatgatacttatcaaacatacaatgggaatcttcctaagaatagtatgaaaaatattgctatcttagaagctgatgcagtcggacttcaaccaggagaatactttactgaggtgaaagcgaatgtaggcgatttttctacaggatatacaagctactcagaatctggtggttttggtgaggaatcaacaaactcctatggtattgtcaaaccaggcatttcttctgttcaatttaaagtatccatttgggatgaggcagatgaagtaaatacgaaagtctcgggtacttctgtttatagtgttgccgataatattacgacagcggcgaacggaacagctaatttttataatgaacaaggacaagtaatc

SEQ ID NO: 3990 - DNA, 113 bp, Listeria monocytogenes 4b specific
  misc_feature (1)..(end): n can be any nucleotide: a,g,c or t/u
taagtccaaagaaaaaagaactgatccgttttcagcgaatcagttcttttttcataaatttaaagttgtagcttttttcttccccaatatttagaaatagcttttcgtaggtc

SEQ ID NO: 3991 - DNA, 644 bp, Listeria monocytogenes 4b specific
  misc_feature (1)..(end): n can be any nucleotide: a,g,c or t/u
agaaaaggctttttaatcgcgagtttctgcgtatttttattaagtacagttgcttttgcttttattggaaattcggtagcaggcgagtcacaggatatcaataaatatcttgtaaaacaaagttatgcgcatatagatcttcctgttactagcaaacaaattgttaagcaaacgtttaatgtagattcgccgttcaattctatccaaatagcggttctaaaagagccagatgaagctagtaaatatcgtttgaaagttgtagataagacaaataagaaggatatttacgatgaagttatagctggatcagattttgtagaagctacaaattaccaaattaatgtaaatgaaaagccaaaaggtaaaactgaatatgttattgaagtctatcaagtggaaaataaaaaccctgaggaaccattagttttaggtacctatactccagatgcagtagatctttatccgtatggagcactgtatgttaatggtgttaaaaaagagaagcaagatatgggcttcactgtctcacatgttgcttctgaaccaattcctcgaaatatgtctccgctatttttgatttgggtgttataattatttttgcaggaacatattatgtgtttagaaggaaaactggagataataga

SEQ ID NO: 3992 - DNA, 116 bp, Listeria monocytogenes 4b specific
  misc_feature (1)..(end): n can be any nucleotide: a,g,c or t/u
atggaataaactttttaacagtaaccaatcaagtactcgggcataaaaaagcaggcattctctatttagaaagaagagaatgcctgtatttatttgactagaaatcaatttcccac

SEQ ID NO: 3993 - DNA, 69 bp, Listeria monocytogenes 4b specific
  misc_feature (1)..(end): n can be any nucleotide: a,g,c or t/u
acagaactcgccgatcactggcctcgagcgttgatccgactagtacacggccgccagtgtgctcggaaa

SEQ ID NO: 3994 - DNA, 1139 bp, Listeria monocytogenes 4b specific
  misc_feature (1)..(end): n can be any nucleotide: a,g,c or t/u
gagaagactgcacctgtatatgcaggcatttcaaggacattttctaccatttctggcaacgctacattagcaagtacctgttcataagtaccttcaatgcataattgattttcagaatcagaaaaattcacgatgattaagagctcagcgtcatctgttttacgtttgtaagcaataacttcatcacttgattctactggcagtaattctccataaacagccacttctttatatttactagaatcacttcttaaatggattaatttcttataaaaattcaatacggaattatcatcgatttgttcctgctctacgttaatatcaaggtaattagggtttgctttcaaccaaatttcatctgagtcggaaaaaccagcgttcttttgattattccattgcatcggtgttcttgaattatccctactacgccgatacattccttcaagcgcttcttccggactcattccagagagaattgcgcgatggtattgatcgtgcgtcgcaatatcgttataatcatctatactttccatccgagtattactcataccaatctcttgtccttgataaatgaacggcgtaccgtgcaacatcataaataacgtgcctagcatttttttgctacgatcatcttggtattcttgaggtaaatacttatttatcgaacgcggttgatcatgattttctaagtattttgccccccaaccatttcgctgtgtcaccagttcattggtaattattttctcttttaattcttttactgtccattctgaattcttgaaccattcgcctgtttcaggagtatcaatatctgtatagctaaaatcaaacaccatacggaaatgaccattttcacctataaattcagaaagtctttcttcaggcacatccgcctcagccacagtaaatgcattatgttttttaaatgtccgttcgtcaatctccttgagccactcttcaattcccggctgatttaaaatccaatgaccgatgaaaaccaagccatcttccccgtccgctgggaaagtaccgtactcaattcttttcttcaaatttaaaatggcatcaattctaaagccacctaaacctttttcaagccaccagttaatcatttggatacattcattacgcactacaat

SEQ ID NO: 3995 - DNA, 728 bp, Listeria monocytogenes 4b specific
  misc_feature (1)..(end): n can be any nucleotide: a,g,c or t/u
gtgctggaaagataatgctgaaatcgaagctgttgaaacactatcagaaacacatattgagggaaacataatagttcaagaaatctatgaagatgaaccaaatcaacttcttaaggcatctaaaaaagcttatataaaagctaaatatacatggtggggtatgcaaatccaattttctcataaagctgttgttgattttaacgatttttattggggggcaggtacgataggtggattaggtgcaaataaacgaatggggaaatttttagcaaaaaaaggaataaaaatcgcatcacgttatgctgtttgtttgagtttatttggtggtggtttagcatggggaatgggtaaaaaagataaaggaaaaggtgtaaatttaaattgtgtattatatgtccctgcgacaataactacagctaaataaaagaaaagagtgtatacatgaaaagaaataaactaaagataatatttcgaataatagagttggtattgggaattttaattattatcgcaacatctgtattatattttatggatattatttctggtggagcctctggcgttatatcagctgttggaatgggtatttttatacacgcgaataatttatctaaaaaagataatacgactgaataaaagattcagtttgttactttattttaaatgattaaaacaaaagccgaacaacttttacttaaaagttgttcggcttttattatatatcccca

SEQ ID NO: 3996 - DNA, 1655 bp, Listeria monocytogenes 4b specific; identical to SEQ ID NO: 3357
  misc_feature (1)..(end): n can be any nucleotide: a,g,c or t/u

SEQ ID NO: 3997 - DNA, 1068 bp, Listeria monocytogenes 4b specific
  misc_feature (1)..(end): n can be any nucleotide: a,g,c or t/u
gaaggagacgactcaatctgcctgttaaggggaacgcccaccttgctgaaacaaatcagacagttacgtacatctactcaaaaacgaaaagtgaagtaaataaaggaacggtcggtatttcattctatactcctgatggtagccgccgggaacttaagtcctcattagacttaagttaggggtgcccagatggtgtcccaacagacacagtattctttttgcgatttagcaaaaaatacgacttacaaagatttaagaaatacgcctgatgcgcctactcttttatggaatgatttgttacattacatggtagactacatgaacggcgatatagatgccgctcaatttgaagaggcagttgggctaacaccagcgaattttgatttagattttatttcacgaaatttcgaaggatataaatttgatgaagcaatgtatcaagaaaatctaagtaaattagtcacttttgagcaagatggcgatcaagttgatttgcaagtaccatttaagaaagtagaagttggagcggatattactgtaaaatacgttgacacagcaggaaacgaattagcatctgtagaaacgttgagtggtgatgtggatgataactatacttcagaagcaaaaacaattgatggttggactttaaaggaaacacctaataatgcaacaggagtctttagtaaagaggcacaaacggttacgtatgtttatgaaaaaaatgatgatacagatgtcacaccggctcctgacaattcagcagatacaaatgatgacagtaactcatcagataatactgcgacaacagatgataatagtagtagcgcagtgaaagaaaaggcgcaaacacaagcaagtagtccaaaggcaggaaaagtaaccacacaagagagcacttctaacaaagtaacagcacaatcaaaagaatcacttcctaaaacgggagataacgtgttggaaagtagcttgttagtgggcttgggtatgcttttgttagggggattatttgtattccttcgtaaaactagaaaagtaaaataaaaaaacgcccagtatttgagcgatttc

SEQ ID NO: 3998 - DNA, 1312 bp, Listeria monocytogenes 4b specific
  misc_feature (1)..(end): n can be any nucleotide: a,g,c or t/u
tgtataggaaatgtaatatttatttaaagtaggggataaatagttgaagttatacattgttttctttaaaaaatgtttattntgtgatagaataagcatgcctgtgtttttagaatacagaatatgatgtttcaaacagtcaagtaatactttatcggcattgtcggttaagaattgctttaagttaacttcaagaatcattaacaattcttgaattaaccagtttgataagatgatgattaaggtaattataagtttcatacatgtggttcctttcgggttatcgtctatattataacataatagttaaatcattcgacttctctcatatattcaatggtcataagtatgggaatattgacctaaagagacgcagaaagggattttaattaagtgtcggacttgttgtccctttccgctccaaaaaaaaggcgtgaatttaagatgctagattcaacaaaactagattcaacaaaattagattcaacaaaatataaaacaaaaaattatttacactttgattatagagttaaaattgaaaatgtagaaagctatgtaactgatcattcgaagattggaaatcatagctttttaccgttaatacgttatgtatcatcttttgaaaaaagaatagaagaaaaaaatccagagtttgacaaccggccaattaagactaaagatagagtaattatgtatgctggacatatggataactttatttataaatattatgcagaagtgttgaacaaggatttttacaataaattttgtatggaaaaaggtatagatgattgtgtatctgcatatcgaaacaataaagtggggaaatctaatattgattttgctgctgaaatcattaatcaaatggttaattataaggaagcttatatattggtgggagattttactaattactttgataaaataaatcacgaattacttaaaaagcatttagcagaagtgttaaatcagccaaggctgtcaaaagattggtttaatgtgtttcgatcaataactaaatatggatattatgaaaaaagttttttgaatgaggaatatggaagtgatgaaagtatcaaacgctctaataaaaaaagttattttgaaaatatttctaaatttagagagtttcaaaaaaataacaaaactttatgtaataaaaataaatttggtatacctcaaggaagtgctatcagcgcagtatttgcaaatatatatgcatcggaatttgatttgaagttaaaagagatagtcgacgactaattctgctgggatatatagatgatactcagatgattttatactagttatc

SEQ ID NO: 3999 - DNA, 1639 bp, Listeria monocytogenes 4b specific
  misc_feature (1)..(end): n can be any nucleotide: a,g,c or t/u
attaaattcgatgtcataactataagaactatgtaaatccgtaatttttaatctagttaatctcaatttaattcctcctaaataaatttttaatactaaaataattatatcatgctttaagaatatccttttatataattatatcttttttcaaacaaatataggtggaaacaaaattaagttcgtttttccatctgtatttagtacatatttttattatcctaacagctatagcagaccattttaaatataagatttaataaaaaataagtattaaaaaatgtttgagtttgttacaattagtaactaagaggtgggatgatgaacagttttgagccaagaaatgaaatagaaagtattattatagagcataatattgattgaaaaatattttttgaagttgataaaatttcttataaaaaaaaatagaaaataaaataatctctaaatttatcaatctggaagatggttttgattttaatttgcatcgagcgtatttgagatataatcataaattaagatgtattggaattagttatcaaaaaaatgattggtgggaatggtttaaattagttccaagcattgtaggacaaacagcacctgtatatgttgtttttactggtgataattatacatggatctatacaggttatttagaggcgttaatgaaaattttatattatggcagtcctataggtgaaggtgattgttatatagtttccaaaaatttgattggcttattggttattctgatgatggcgattatgttacttgcgtagataatggactgttcttttctatagataaaatggtccttctagataatgatataaacgtacatctattgccagtacaggctcactaattagttatccatcatttagtagaaagaaaatttaatgataataagtagtaactcgttttgtaaattttactaccatatttatactcaaccaaaaaagaaggaaaaaacatgttatccgatatcacaattacaattcctaacaaaacagctcaaacaaaatacgataatctagcaaaaaacatgtcttttaaatcaaaagaggatttggagtcattgcttgatttgatcaagattttgtatataaacaattattatgaagaggcgcttttgtgttgccgactaacgaacgacgtagaatttgataatgattttgatgtttggacatttattcataggatttggatgtttgaaatgcaaatacttgtgcattttggggaaaaagaagaggccgaagaaattgccactaaaatagaggcgcattttaaaattccaatgaaaatatggaatactcctgaaaaaagatacgcgcagtataaaaagaatcgttctcggattgttcttaaggatcttagctatgaagaaaaaatcaatagcacacctagaggagaatctggaacatttgattggaaatttgtcgcattatcaagtcttatcaaaccaattactttgaacaatatgactggtgtttcggtagaagaagcagaagaaatatttagacaatattcagcagagttacaacaaacgaaaaagtatggagtttcgttataattgcagatatctcatgtatttgtaaaagtctttgtagtaaactagtaacagaagctaccaaaacgg

SEQ ID NO: 4000 - DNA, 480 bp, Listeria monocytogenes 4b specific
  misc_feature (1)..(end): n can be any nucleotide: a,g,c or t/u
gcgatttttttataaattccaaaaggacgtgagtgaatgagacaaccttttcaagttttagttataccgtttattaaaacggaagcaaattatcagtttggtgttttacatagaacggatgcagatgtttggcagtttgtagctggtggaggagaagatgaagaggctatttcagagactgctaaacgtgaaagtatagaagagttgaatttggatgtcgatgttaaaatgtatagcttggattcacatgcatccatccctaattttcatttctcatttaacaaaccatatgttgttccagaatattgttttgccattgatttaacgagttgttcatatcaggttacattatctttagagcatagcgagttgcgctgggtttcttacgagtctgctgttcagttattggagtgggatagtaataaaacggcgctttatgagctaaatgaacggttgaaaaacaatgatatgaaggcaatg

SEQ ID NO: 4001 - DNA, 200 bp, Listeria monocytogenes 4b specific
  misc_feature (1)..(end): n can be any nucleotide: a,g,c or t/u
tgtaattcttcccgaaaaatatatcctccaaacaaatacttttcaatactttcagaataatataaaatcattgcccgatttatatgttatatatatccatctacatccttttaacgtctgtctattgaagaaaaacctagctccatcaacacattcccatcgtaaaacagtactaaaaacaattatgtcgaaaccttgaa

SEQ ID NO: 4002 - DNA, 1649 bp, Listeria monocytogenes 4b specific
  misc_feature (1)..(end): n can be any nucleotide: a,g,c or t/u
tgtttcttcgttcgttaggttaggggcgcggagcccgaatgggatgacgcacgtggacgagcggcgcacgggggaacaggcagatgggtgggatgcaggcggaagaagggtggagcctctgtccattgaggggggtgtgcgcaaggctttcgccgcaagaattcctccaccaagttcagaaagtttagtgtccagctgcgtgcttagtaaagaaagctctctatcaagtatgtcattatccgccaacaattccctagtatatggactcaaagcagctggataatcaattgctaactcttcaaatatttcatatnnnnnnnnnnnnnnnnnnnnnnnnnnnnnnnnnnnnnnnnnnnnnnnnnnnnnnnnnnnnnnnnnnnnnnnnnnnnnnnnnnnnnnnnnnnnnntcaattgtttcacctcatttattttttaatattatagtcaatggatttgtgtggtgtgcgtgtattatgaatcgtcaactatgtaatctcgtatgttctttcttagcatttctaacaaaaaagctataacaactataaaacacttgaaaatgaaggtctctatttcttcaatttagaattgactttgtatattttcccaaatttctattataagttttccatttattctagctgttcctaataagtcttctgaagtcctaaattcttgtgtttctccatcggatactttcgttaagtaatgtccttcccgatttttacttaaccaatattcctcatttttgtagtaaaaattatattcctcaccatatgctaaactatcagccatttgttcatattccatgcttctttccttctttcagaaacaggttctctatttattaaaaaagcacattactttaaactccctctatccgttcaatcactccagtagttcatcctgtctcggttttcgaacaagtgtaatatatttttcctctactgcgcagaatttcgcataatttatttttgcttgttttaacgaaatattattagctcctataatttcatccggatactcttgagctaccacatcatattcccagtagcatacttcgcaaatatcgtaattagcttcaatcgtataattttcacaaactggacactgtttcaaagttattcctcctcatcatttcggataatataaatcaatttgtttctcccaatattttaatccagttaggtttgaaatatgtagatatagatccatactcgtttataatcccaaattcatttgttttagaatcatacctaaaatataataccctactaaatgttcataaccttccaataatccacttgttgtgaaaaaccctacatccaataccttatccattaatatttttccaaaaagctcataattaaatttgttaaagtgctcaaatcatttcatttttctattccgtactttctaaaaaataaggttatcaaggatctacttttacgacgctaattgagatgtggagtgttttttacttatttactttttctataacatctatattgaatctatcaacatttaatgcaacaaattgattttccagaataccacaaaatcagaaatatcctcatctgctaaatcaatctctatccctgaatctattttcttactagaaggatgaaaaacgcctctgataaagtatgcaa

SEQ ID NO: 4003 - DNA, 74 bp, Listeria monocytogenes 4b specific; identical to SEQ ID NO: 3394
  misc_feature (1)..(end): n can be any nucleotide: a,g,c or t/u

SEQ ID NO: 4004 - DNA, 733 bp, Listeria monocytogenes 4b specific
  misc_feature (1)..(end): n can be any nucleotide: a,g,c or t/u
gtcctcggaaagaagatcaagcgatgggacagttaataaatcaggggggggggcgatagatggacagcacgcacacccggttagaacagcaactacaacaagtgaaaaaagcgcaggatgttttacaagataatctggggcagactaagcgcaaacaagtggaacaagaatggttagaagaagatagtcaccaattagaaatggagaaacaaggattattggacttcttgcgaggcggttggcaaggggaggaagcgaatggtttccaccgctatctagaagaacaacaacacgaagaagcgatggcatggcgaaaagatttgtcggaaaaacgtgttcatttggaagaagaagcgcggactactagagcagaaatgcacgatatagagaccaaacaagcctccttgcgaaaggagtggaaccaatgagtcgaatcgacattgcagaactcaatggctttcttcaaggattacgaagcagtaatgctgaggctaaaaagatgatacgcggaattcaacaagcagcaagcaagtatgcgcaagataaaagtttaaaagggcaagcagtatcagcttcccaaagctattttgcttccagttatccctctattgcacaaagtattttagaagctctagaagaaagtgaagaacgtctagcacaatacatacgcgagtttggtagccagtcgacagctcgcctcgacatgtgcgatctcagacatgcaaggagtaga

SEQ ID NO: 4005 - DNA, 425 bp, Listeria monocytogenes 4b specific
  misc_feature (1)..(end): n can be any nucleotide: a,g,c or t/u
tgcctctcttattaatttaacatctttttttgcataagaaggtgcagttgcacttgatataaatgttgatccttctgaataatatggtgcagaccaaaatgcatttgtttctggatatgcaatattagcatctaaattaactgatttattgtactcaattgtattgtacgcagttgttgcagcctctacagttttaatagaatttaaatttgtaaaactgaacattgataaaaacatcataattgcaattaaactaatcatccctttttgtacatttctctttaacatgattttgttccctctttcatttatatgtattatattacaaaattaatatagcatgaaatattaatgtaatacaatattattttttaaatttaaaaaataatataaaaggttagaattttgatattcttgaatatcat

SEQ ID NO: 4006 - DNA, 242 bp, Listeria monocytogenes 4b specific
  misc_feature (1)..(end): n can be any nucleotide: a,g,c or t/u
cgaatattatgatagcctgagctgaaacttttcaaagaaatactaatgtcagaatttaactcaccttcgtaaagtattttaccagaagactcatctgtaattgttacctcatgaccttcaaaaagttccctatctaacataaactccgcatgcaaatcaataaaagtagaactgccagaaagaaaaggagtaagcaatgtatcattcgttacgttgctaaaataagtggttgttgccgtcaa

SEQ ID NO: 4007 - DNA, 1997 bp, Listeria monocytogenes 4b specific; identical to SEQ ID NO: 3411
  misc_feature (1)..(end): n can be any nucleotide: a,g,c or t/u

SEQ ID NO: 4008 - DNA, 1397 bp, Listeria monocytogenes 4b specific
  misc_feature (1)..(end): n can be any nucleotide: a,g,c or t/u
tattgccgttctttccatccactggagatcgagggtttgcgccaagtgattacacaacagtagatagcgacctaggttcttgggaaataatcgagaaattaggcgaaaagtattatttaatgtttgattttatgattaatcacatttctcgcgaatcactcttctttcaagattttaaaaaagagcatttaaactcaaagtataaagatatgtttattcgtatcaatgatttctttcctccgggtagaccaaatgaaaaagacttagatttaatttataagagaaaagataaggcgccttttcaagaagttgaatttgctgatggggaaacggaattagtttggaatacttttggggaagaacaaattgatttagatgtgacagccgaagttacaaaagaatttattcgtcaaacgataaaaaatatggctgcacatggttgttctattttgcgtcttgatgcctttgcttatgcaattaaaaaattagatacaaatgatttttttgtagaaccggaaatttgggatttactggatgaagtgaaagcagaagcggccaaatatgacatggaattattaccagaaattcatgaacattattccatccaaatgaaaatcgcgaaccatgattattatatctatgattttgcgttacccatggtgatgctgtactcgttatatagtggccgagtggaacgtttagctaactggttagaaatgagtccgatgaagcaatttactactttagatacgcatgatggcattggcgttgtggatgcacgcgatttattaacagatgaggaactcgattatacttcagcagaattatacaaaataggagctaatgttaaaaagatatattcctctgaaaaatataataacctggatatttatcaaattaatagtacctattatagtgctttgggtgacgatgataaaagttacttgttagcgagagtaattcaatgttttgcgccggggattccgcaaatttattatgttggtttacttgctggcaaaaatgatattgaccttttagaggaaacaaaagaagggcgtaatattaatcgtcattactacacaatagatgaaattaaaaatgaagtaaaaagaccagttgttaaagcgttgtgcaatttactgaggtttagaaatacttctgaagcgtttgatttggaaggaagtatagaaattgagacacctagctcaaatgaaatcgttattattcgcaaaaacaaaacaaataaaattacagcgacattaaaagcaaatttaagtactaaaacattccaaatcagcgaaaatgaaagaaatattttaatttaacattttataaacacgaatgagcctcttcgttcgtgtttatttctattttctattgacattggctaatggtta

SEQ ID NO: 4009 - DNA, 648 bp, Listeria monocytogenes 4b specific
  misc_feature (1)..(end): n can be any nucleotide: a,g,c or t/u
ggtttattatgtgggggggtccggtaaaaaagagcagcggggagaagatagaacagggttataaagcgcgggcggcgcccgaatccaggggctataggtatgaaaaataaatgaggtgaagcaattgaaagaattagcagcagaacagtcttttgaatattacctttcttcgctatgtatgttaggattgcatacaattaatttatccgacgaagaaattgaatatgaaatatttgaagagttagcaattgattatccagctgctttgagtccatatactagggaattgttggtggataatgacataattgatagagagctttctttactaagcaagcagctgcaaactaaactttttgaacttgatggaggaattctgtggtaaaagcattgagaacaacgccagaatggaaagaggttttacgattatctgatgagataaagggattgattcatcaacaatggacagatgaagagctagattatttattggggaaatagtttcttagtctatggaattaggtgtaaattctatgtgctctttgaaaaaggaattgcctacaattaagtgaatgccagaaactgttgatattaaaaatttaaatttatagaagtaggctttaagttggttaaaacaggatactttaa

SEQ ID NO: 4010 - DNA, 1773 bp, Listeria monocytogenes 4b specific
  misc_feature (1)..(end): n can be any nucleotide: a,g,c or t/u
gacaatgggaaatagctagtataaagaatttaattttgtaaatttaggtgtcaatgatttaatagtatagttatactaaagtggaaattaaataaaaaattgcttaaaatcaatactgataacgaagaatcaatgattgctttgagtaatgtggcggattggaagcaaattatgaagaattaaatttaaattgatgggcaaatgatttaataaagaaatctttcaggagcccacttgtgattatatcaacttgacatattagtaacatcattgtaacattactaatgtaagcggatacatatatagttgaagtactttaagaaaaaaacaaaagtattgtagcgtgggatgtcgcgcttttaggtaaaggagatggataaaatgaaaaaaattattattggtgtgtttttcgggattcttattctagttattgttggtctatatgtttcatatgtctatatgaatcaaagctttatatgggttgcagggatacttttgttgttaggtacattattcaattggtttttgtataataagtatctgtctaaaaaaacataataagggagcgagataaccatgaaaaaatcattatagtactagcatcagttatgttaatgtctctttcggttctgccactggcaacttatgcatcagaaacagagaacactcctactgaatcatatgacggagaaaattttatagcaacccaaacaggtaatactttagttattgaagataagaagacgggcgaaactgtaaaaattgaaatgaatgacgaagaaaacggggtaattacatctgatgatggtacaatagaaaatgtacatagggatgaagaaggtaacgtttatgtagataatgagcttgaactagaagcacctcctttagacattgaagatggcataaatatcgccactcagcctcggttactgaaagcttctaaatggatatatgttcaaacaactaagtataatacaaccacacaaggcaatatgagaagtcttgcattggggattctatcattcatgccaattacaggtccaatctttggaatagttgcaattattgatgctgctcgatcaatgggggcgaaaacattatatgttagagtgaaacaatatcgtactagtggttatcaattttataagtatgattcttattattatgccaatgctagtttaactaagctagttaaaaaaacatcccagactaaacgaatgtggtagggcattattaaaaaaaatagtataaactaaaagaccttgctcaaagattagcaaggtcttagactggggaagaaaaagtcttctctttttctgttttatggaaatgttattccgtattttagacgagtttcttctatggaagaatacacaattttagggaatgtgtctgatatggcagctagattctctgatagtgaataagatttgaaattacctaatgtttactacagtgaaaagcaaattagagaagaagtgactcgttctttagaagctttagcttgaatcataaaatttgagaggaacgtaattatgcaaaaagatacatatagcggcattcattgagtgtatcaatgtgatcaanagaatctgggaatattaatacattaggtaaacgtggagtacgatcnnnnnnnnnnnnnnntnnnnnnntnnccnntntttnnnggggnnnaaaaaannaccggtnntgttnnnnaaattgnngtnnangacccaangccctggggnaaaattttggaggttaaaaaacacctctcttttcgcccca

SEQ ID NO: 4011 - DNA, 1701 bp, Listeria monocytogenes 4b specific
  misc_feature (1)..(end): n can be any nucleotide: a,g,c or t/u
tacctcttgaaccttttcttctatctccagttggtctagttctttccattctaggtttatcataacagccctcttttctgtgtatgctttggacttcgtttattccgcctctttttcacaaatcccttagcccaacaatccgacataaaccccgagataagcatacattccaactgaaaaagtacataggacaacagcacatatacctttaaatatcatacttatcctactttttttaattaaatataatcctgcaattattactaggttaatcaaagctgcaattgagatagccatgataggaaaacctccttaataaaataaatatgacgtgattactgttataccaagtaaggttaaaaaatatatttctataattctttttgtccgctttcttatctttttaacatccataatttctagtgagataatgacaataaaaatggtttctaatcccaaaaacacagttacaataatatctgtgagaaaattataaaaaaacatatgaattaaaatagaactcatgagaaataatattaaaaacagtagaaagctattttttctgataaaagccaataagtattcaactcccattttcaatttacttcaatcttatacactaaaccgtctctttgcttgtgttccgaaatctttttgttattatctaactgtttaagttttcctcaatatcaggaaaatactgctaagctaggcgaatcactgattattaattctttttattattttttctttatttctgcaaatttttcctatctttggaaaataattttcaataaataaaacttgctataacataataaatatatattcctaaagcgactatacctaatattgctgataggatagataaaattgtagactttcctttacttttactccataaaactaatatgagttcgctgcacaaaataattatttgcactaccaaaatcacataaatatatgatttcagggtttcgctactgcttatgaaaatacctgttccaactatcataatccccgcaaaaagtatgcttgcacctacgatttccaagatacctttagttttttctgagagaagcagcggaatgcaaactaattgcaaatgtaataacatttattgatacatcgataataaattcaatcatgattgtctcctgtaatgttcataatgtttttctcttcactttacatagctcactttatatttgaatagagattaatattgagatttcaaacgctaattcttctatagtggctttcattcgttaaatgtccagaccgagggactagcattatacaataaattataagggctagcaggaaaataatgatagctatattgttaagcacggttttattgtttttcttacgtctcgtttcatagccaataattaatataagtagaaaaacaaaatatattattatcacaaataacatattatccctcgatccttcttaaaagtagataattattcccgtaaccgcaaataaagttaacaatattaatacttgcatacacctataaaagaagctgtctttcttaaaatctataataactatacacattataattatgccgatgaattccaaatccattattaatttcaacattgaatccatttcaatctcctaatttggttattttctttcctttttctttttttatattctctaggattgtattcttactatcttgct

SEQ ID NO: 4012 - DNA, 1932 bp, Listeria monocytogenes 4b specific
  misc_feature (1)..(end): n can be any nucleotide: a,g,c or t/u
ttcaccggcttgaatcatttgttttaattgttttacagttagagttggatctgttccattgaaaccaccaagtgccataacagcttctttcgttttaataatataaggacctgctgttgttgcatctgttgtcccaaataagtaggtttctccggtattgtttttctgtaaatagctaattaaatcactatcaacagatgcatcggcgaatccaccaccactagattgttttaattgtggtccagcttcgggtaaggaactattcccaccatataaaataggtgttaaagaccaatatgttggagcaatgagcaaaatcgctaaagcgagcgctgttattttcgcggtgagtttggaaggttgtggtctaagtacaattaagataatagacgtaattagtgcagcaataccaataactaccgctaaaacaggcaagtaagcagcaacaaagaatgcttgtagacctccagttagcgtaactgcagcaggtagcaggaacctttgccaattctctttgtcttggtataaccgaaagagcgccactagacctacgccactaagtaaagcaattggcggagctagcataatcaaataataatgatggaaaaagccagcgatactaaagaatccggcgacagggataagccaagctgcccagaaaactatttccttttgtctggaggtcaattgataaattcgtttattttcatttcgatacaccaggaaaatggctagcataccgataatagcaagtggtaagaaccaactaatttgatcaccaagtgcggtttggaatagacgaagtggtccagcgttccctgttccaaacatgcctgtgctaccagtcatttttgatccattcccgccgccgtttgccgcattactgggagctccagttggaggagtgccattatttccttgaggaggagttccgccgttagcaccgtcctgcatacttccacttggaggagtcggtggggttgcgttacttgaatctgttgagttagtgctaggaggagtccccatttccacattaccattactacctgttccagtttcttgaccaagaagccgttccataccattatagccaaatgccaactcaagcaccgaattggtttgactactaccgatataaggtcgctctgaagcagctgtttgatcaactacgactgcccaagaaacagagacacctagcattaagacaagtgcgattactaattgaactagcttttttctccaacttagttttgtagcaataaaatagaagagcaaaaatgcgggcacgaccatgaaagcttggagcatttttacattaaaaccgacaccaatcaacgcaaaagaaagtaaaagccagccgatttttgcacgatgaacagctttaaaaaggaaaaaggttgctagtaataacacaaatacaagaatagcatccatattattagtacgcgtcacggctaccgcaataggagtcagcgccataatcaaagcagtaattcttgcagcccatgcgccaaatctaggtttgacgagcacataaagcaaaatcaccgaaccaacaccagccaacgcttgtggtaagataacactccaaccatgtatgccgaaaataagggcactgatcgcttgcaaccaaagtgcaacaggtggcttatctaccgtaataaaaccagcaggatcaaaagctccgtagaaaaaattatgaatattttgcaccatacttgtcacagcagctgtataataaggatttaccgtatcatcattccaaataccataaaaattaaaaaagatggcaataacaataattccaacaaaataaaaatctaaatgttgtatccgtttcttcatattcttcacttctttccataagataataccttttattttagagttcaaatatgaaaaaaacgtgaataaatttagaaataaacgagg

SEQ ID NO: 4013 - DNA, 723 bp, Listeria monocytogenes 4b specific
  misc_feature (1)..(end): n can be any nucleotide: a,g,c or t/u
aggatattagaagcaaatgacaatcaattaagcgatataagtgcactagcaaatgtgacaagtctgcaccaattaagattagctggaaatcaaataaaacagttaaatggagttagtaatttaatcaatctagaaaccatagaactaagcaacaatcaaataacggatataagcccagtttcaggtttgaaaaacttaattggtcttggaatagattataatgatatcagtgatttaagcccaattgctggcttagcaaagttaagtcatttaactgcagacaataaccaaataagtgatttgagtcctatttcaagcttaggggctatggaaattatgcgactagataannnnnnnnnnnnnnnnnnnnnnnnnnnnnnnnnnnnggctaatttaagctatgtatttttagctgaaaatcaaatcagtgatattagttctttacaaccactttttaattcacctaatttttttggtattactttagacaatcaaaaaataacgagtgaaccagtattgtaccaacaagagcttgtggtccctaataacattaaggatgaaatgggagcgttaatctcaccagatacaattagcgataatggtgtttatgcaagcccgaatattaagtggaacttggctaattatactaaccaagtaagttacacatttaataaacaattagcacagggttcttttagcggaacagtgacccaaccacttcac

SEQ ID NO: 4014 - DNA, 548 bp, Listeria monocytogenes 4b specific
  misc_feature (1)..(end): n can be any nucleotide: a,g,c or t/u
gtctggtatcattggtacactctctggaagttctccttgccaaccttctctcattaattttggttcattccgaataccttcaatctgatgaattgtttcttctccttgcgatggtaacgtcgtttgaaatgttgtacctgtttctaattttacaagcgctcttcctggatactcttcaagtggtgtatccgttcgaccaacagttgatgatatatcatttttatcaattagatataaagcaatcatttgtttaatattagtagccatttgtgttctcaaactcatatgccttgatgcgcttataatcataaacattccaatggatgcaccttcacgagtaatttgagtaatgattttttcaaaatcatcccctaagcctgcatcttttacagcgtcgtaattatctagaacaataataatattaggtagttcttttccacttgctctttcatactgctctatattggcaacacgatattggctaagaagcttcttccttgtttttatttcatttaggcagattcgtaaaaatttctgcactttctcaa

SEQ ID NO: 4015 - DNA, 1215 bp, Listeria monocytogenes 4b specific
  misc_feature (1)..(end): n can be any nucleotide: a,g,c or t/u
ggtgcctcgactactgttactttaactgtgaaagaaatcaaaacagctattaatgcacatgattctattctgtatattgatgataattggtcagcaaaagataattttgatagcgctagggataaggatggaaatatagtatcctttaatgacgtacaagtcttgggaactgttgatacaagtcaagcaggaacatacccgatcacatatgtttatgctggaattaccaaaaccattcaagtaattgttaaacatcccaaaacagctgtgcgagcccatgattcagtgatttatgttggagataattggaaagctcaagataattgggacaatacgctcgataaagctggtcaaaaagtgaaatggaaagatattactgtcaaagaaaatcctgccgtggatgtaacaaagccaggcgtctatgaagttacctacagttatgacggtatttctgccacgattaatgtaaccgtgaaaccaagaaaaacgactgtaaaaattcatgatagtagtttttatgccggaaatagttggaacgcgaaagataattttgaccatgcaacgaataaagcaggtgaaaaagtagcattcaaagatattactgtcgcaggtaatgttgatagcaaaacaccaggaacatatgaaattagctatgtatacgatggtgtgaaagctgttgctaaggtcactgttttgaaaaaccattctattttgatggtgaaagatcgtgtcataaaagtaggcgagaaatggaacgcgaaagatagctttattcaagcaactagacgtgatggaaaaaatattccattttcacaagtaaaagtgcaaggaaaagtaaatctgaacaaagcaggcaaataccaagttatatattcagtagatccaaatgaaggaactgaagacgcagggaaacaaatgttgtcagtaactgctactattcaggttgaaaatagaggagatgcggggttacaagataatgaaccacgaagcgtaaaagataacaatcaacgcgctgctaactccaacgatatcaaactcattcctaaaacaggagatcaaacaaatcagtgggttttatgggctggcctttgtttgactggtttagcaatgcttctatggggatttgctctaaggagacgaaaagtgaaataatatttattaaaaataaaaaaggaaggtttccaaacagcggaaaccttcctttttcgtgtatta

SEQ ID NO: 4016 - DNA, 1329 bp, Listeria monocytogenes 4b specific
  misc_feature (1)..(end): n can be any nucleotide: a,g,c or t/u
atcattattgtgaccaattgctttattacaaacttttggattatcggaagcgtttcgaatgttgctggattcgctgaggcaaataattggctgttattaagtattcaattggtatatattattttggtgatgctcattggcggaaatatttatcgaaagacagatttatataaactaaactagggagaatatcgatgaattatataaaagttaatcatttaacaaaagtaatcaacaacaacactgtactagatgatattaattttgaattaaagcaaggtgggatttattcgttcataggtcataatggctctggaaaaacgatgctttttagggcgttatgcggttttattgcgccaacaagtggtgaagttacaattaatggcattagtattagcaaaactagatctttcccagaaaagaccggaattattattgaaacgccaggctttttagcaaattatactggttataaaaatttggaatacttagcttctattagaaatcaaataggtgaaaaggaaatacttgctgcgttagaacaagttggactttctggaaaagagaacttgaaagtgaaaaaatattcgcttggaatgagacaacggcttggtattgctcaagctattatggaagacccagatttattaatatttgacgaaccaacaaattcgttagataaagctggcagtcagagttttattgacttgattttagacttaaaagaaaaaggaaaaacgattttgttagcaagccatcatattgctgatattgatggtatatcagatgaaatatttgaaatggaagcaggtcagataataaataggagaaaagtatgaaaaaaatacttggcggaatcttaattatttttgtaataggcctgtttgcttggcgcgtatatgatgtaaaagctaattctttttcatatgaaaataaggcacatgctgaacaggaaaaatttcaacttggaagctcaacaatcagtgctggaaaagcatttgttgtaagtgatgcagacttaaataaatatgtgacaaaagattattttaagcaggaaaataagactcttttgctcgttcaattagaatctacagaaaaagatataagaatttctgattttcagttagggtataaagaatttgtaacgttgtcagatacttcggcagcaagttatgaatttgaagatggggtgtataaaatggtgttaggttttaatatacctaaagaattactagcaactaacaagacattcacattagttactccgagtaaatattggaagaacggagcaagggatgttgtggaaatcagtttataaaaagtagcttt

SEQ ID NO: 4017 - DNA, 1554 bp, Listeria monocytogenes 4b specific
  misc_feature (1)..(end): n can be any nucleotide: a,g,c or t/u
agaaatagtgtggaaataacactacttgcaggaaaagcttttgaaattaacttatatggagaaccacaggagcttcattcaactgtaaatgtaactaaatgaaaaatgaaaaactcgtatcagatagcctgatgcgagttttttgatgatactttttcgatactttttgaaagttaatttgtcttatacttagtttatcagctgataataaatcaaaaggggatcggataatggcaaatttgaaagtaatagaaaatgaagcaactattctagcttctatacctaaacataatgttgattacaatgctagagtaatgcaatctgtttctgttgactacgagcgagatatgatttactggacgcaacagtacagcggaaaaaaaatgactgatgctggagctggggagtcatataacattacgaggacagatttgaaaggaaattacattgatcaaatgtggtgtttaaacggtgggcatggaacaaatattgcacttgattataatttagaaagtaaaaaaatgcatatttggtcggcatataaaattaacaataaatgggaagtggtttgttacccttatgaaagtaataaaatcctaaagggaaccgagtccagtattttcatttcaaaagtagagagtggcagctataaccgaatttcaggagatttgaaaaacgatatgttggtttttcattcaggtggagatcctaaaacgtttaatattagaatcgtgcgtgcttcctctgtaagagagggaaagcttgaagtactttataaagtaaaggcaactgaagcaaatgatgcatatgtttaccaagggtgtgcgttagattttccatatttatatacagcttctggtactggtggcgttgaagaaccaaaacaattaacttgcgtggatatagtaactggaaaacgtgtgtatcaaacaacatttaagttcaatacaaaagcaatgcaaaccacagaaagcaattttgcagaaccagaaaatgtttgtgtatattataaaaataaccaaaagcatattgtagtaggatatgctttgggaggagcagggaatcgtatgaatagagcatttgatcttgtagaaaataatagtgaaaacatagaaacagaaattgaaagtttaagaaaccttattataagtagaaaacgtacagaagttatttttgatcaaagtactaaaggggatatgacaacaaattttaaattacgtgaaacgttaaataattttgatattatccaagttgtccttgaatctggtggggggtatacaactgcatctcgactcgtatcgccaaaactattcgaggcatctaaatcatttatttttgcttcgagtaatattggtgatgctagtggaaataatgtagatatgtacgaatacgctgctaattttaatgatgacttaacatcttttaagaatgatcgtgcagtcaaaatcgaagtttcaaataacggaacagtacggggtaatattacgaatatgggtattaaaaaaatctatggtattgttttgtaataaattaaaattaaagagcgctgaatga

SEQ ID NO: 4018 - DNA, 1624 bp, Listeria monocytogenes 4b specific
  misc_feature (1)..(end): n can be any nucleotide: a,g,c or t/u
cagctgatatattttggctgctttttaatatgctttgagttctaaataatgctagctgcatagtacagtatgattgtgaatatgttattatagttatacagtaaataaatatgtcaaaaatagctactaagaaaattgacttatattgggaagttttaaactaatttaagtttcaacaatgcgatacaatcaagtgattttttgatatatttatttgctaatagacaaaaaaggagatgcaactatgaaaaagcttagaatatttactttgatgcttgcttttgctctatttttacttggtggaggaattgttgcacaagcagcagaggaagccccaatcgatgaaaagatagtggggaaacggtaacaaatgacggagaagagtttatagtcgatgagattagtgatttagaagatgttaattcaacaacggggacgttagatacatctgatgaagttgaggttgatttatcaggattaactattgaaaatgaggaagccgttctaaccccaggtttaaaaacgatttttggcggagatggtagaaaacttgtaacaaatacaactcaatatccatattcaacgagcgcttaccttgtaatggaatttccaaatggaaaaacttatataggtagtggacaattgattggtgaagattctgtacttacagccgctcattgtttatatggtaaaaaagatggtggatgggcaaaaaaagtgactgtatatcctggatataatggcacgaaagctccttttggaacagcaaaagcaagaaaaatgtatgttccaaaagaatggacaaaaaaagaaccttctacagaagattatggtgttattaaattagataaaaatattgggacaaaaactggaacaatggggttaacaactaatacatctggtgcaattactattagtggttatcatggtgacaaaaaagggaaattgtacactcaaactggaaatatctctcaagtcactgcaaataatgttttttatagattagatacaacaggtggtagtagtggtagtggtgtttataattctaaaaaacagattttagcagtaaacgcatatgaatatttaaatggtaccggggacaactttggtacaagaataacaaaagaaaaactaaataatatttatacttgggcgtttgacaataatctttctgtaagcaaacaaaaagggataaattacgagctccacgtccaaagtaagggatggatgggaaacgttgctaatagtatgacttcgggcacagttggccttggcttacgagcagaagcaatgaaaattagtttatcagggatgccgtattctggagatattcaatatcgctcacatgtacaaggtagtggatggcaaggttggttgaaaaatggggaaatttctggaactcgtggacagtcaaaacgtctggaagctttccaagtaaaattaactggaaatatggctaaaaattatagtgtgcagtatagagcgcatgtccaaaataaaggttggcaaagttgggttaaagatggagcaacagcaggaacaacaggagaaagtttaagaatagaagctgtacaaatgcgactagttgcaaaataaatttaaaaaaatatggtgtgtaaaatgc

SEQ ID NO: 4019 - DNA, 60 bp, Listeria monocytogenes 4b specific; identical to SEQ ID NO: 3497
  misc_feature (1)..(end): n can be any nucleotide: a,g,c or t/u

SEQ ID NO: 4020 - DNA, 2850 bp, Listeria monocytogenes 4b specific
  misc_feature (1)..(end): n can be any nucleotide: a,g,c or t/u
atttttgactaattttttggtataattacggaaaatggaatggagaaaagttaatgagtaatggtagtatatcaatcgaataaaggtatttaaatgattgccgaagtcagagaaaaaagggggcaagcagtatagcgaatccagaattgcaactatgcacgtagtacagatcagttgagatatatagtaaagcagatgcaagcggtgcggccgttatccgtttctgtaaatcaatcggacttcaaagttttccagaactaaaaagacaattatcattagatttggctcaaccgcaaaagaaaggctattatgatattgaaccaaatgaagattttcataccatcacagaaaaactagtttccaacatgattcaaacgatgaacgatacggctagccaactagatgaagccaaagttttagaggcatgcgaattactcggcgaagcagatactatttatacatacggggtcggggcttcttggttagtagcagaagatatttcacaaaagtggctgcgtgcagggaaacatgttttagctacgcaagatgcacatgttctagcaatggcttttgcaacggggaagaagaaagccgtttttattgctatttctaacagtggagaaacatcagaagtcttgcaactcgttgatcaagccaaactgaacaacgtcattgttattagtcttacacgttttggtagcaataagctgaaggaaaaagcagatttatctttagaaacttctcgtgctccggaagctgaaattagaagtacagcaacaagttcaagacaagcacaattgctagtaattgacattttattttactattatgcatcccatcactacgacgaaatgattcaacaaattaaacattctcgagaggccacgaatcgttttagagaataaaagaagataggtagtagcttgataattaaagctactgcctatttttttactagcaattataaataaaaattttaatattaaaattatatattgaaattttatttcatttatattatactgtgttggaaggagtggttaaaatgttagagaatttagcaacagaagaacgaaatgaaaaaacgattgacttagacacactttctccaaaagaaattttagcagtaatgaatgaagaagatttaacagttccaatagctataaaaaaggtcttacctcaaatcgagttaattgtaagcggtgtcatctcgtgctttcaaaaaggtggccgtttgatttatcttggtgccggaacaagtggaagattaggagtacttgatgcagctgaatgtgttccaactttcggggtctcaaaggagcaggtcattggcttaatcgcaggtggtgaaaaagcttttgtagctgcaatagaaggtgcggaagattcaaaaatacttggcgaaaatgacttaaagcaaattaagttaactgcaaacgattttgttattggtattgctgcaagtggtagaacgccttatgtaattggcgcacttgattacgccaaatctgtcggggctaaaaccggagcaatttcttgtaatgctaatgcaaaaatttcagcgcacgccgatatagccgtagaagttgtgactggagcggaaattttaacaggttctactaggttaaaagcaggaacagctcagaaactagtattaaatatgatttcaacagcttcaatggttggaattggaaaagtgtataaaaatttgatggtggacgttttaccaacaaataaaaaattagaagagcgctctaaacgaattattatggaagctacagaggctgattacgaaacagcaaataaattttatgaagcagctgaaaaacatgtcaaagttgccattgtcatgatcttaaccaattcaaccaaagaaatagcgttagaaaaattaagtgaagcaaaagggtttgttcgaaacaccattcaaaaataaggagctggaataatgacaaaagaagcagaaattggaaaacaaatatttattcatgtcggtggaatggaaaacgtttcaagaattgcacattgtatgacacgagttcgattggggatagttgatagtgaccttgttgatgtagctggattaaaaaaagttccgggtgttatcggtgttgtagaagatgatactttacagattattgttggaccaggagttgtgaacaaagtggccggcgcaatggcagaaatggctggtgttaaaattggcgaaacgattcaagaaaatttggatagcggcacaaaaactggtaaggaattagtcgaagaaaaagcatccaaaacaaaagctgaattaaaagcaaaacaaaataattcatctggttttaaaagattactaaaatcaatctctaatatttttgttccactaattccgggttttgttggagcgggattaattgctggtattgcagcaattatttctaataatataacagctggaaatttagatgctgctgtttggactcaatatattgatattttaggagttattaataaaggaatatttgccttcttagctatttatgtagggattaataccgcgaatgaatttggtggaacacctgtactcggtggtggaatcgctgggataacattgctttccggattagcagaaggacatacaattacaaacattttcacgggggatcctatcgtagccggacagggtggcattatcggcgtattattagcagtttggttaatgtgcgtacttgaaaaaaacttgcgcaaaatcattccgaatgcgatagatattatttttacgccaacgcttgtattacttattattggtttagtaactattttcttaattatgccttttgcaggacttgtatcagatggtttagttaacgg

SEQ ID NO: 4021 - DNA, 46 bp, Listeria monocytogenes 4b specific
  misc_feature (1)..(end): n can be any nucleotide: a,g,c or t/u
tgctctggacttacagctgctcgagcgccgacagtgtgctggaaag

SEQ ID NO: 4022 - DNA, 2269 bp, Listeria monocytogenes 4b specific
  misc_feature (1)..(end): n can be any nucleotide: a,g,c or t/u
aatacttagaactacacccctatgtattgaagttacattcaatggtcagagatatattttagaaaaatttaatgaatctttgagtaattatcgtcaatctataaacagaaatctagaaaaagacttttttggtgaaaataaatttttaaaagaaatagcagatatgtttaactatgtgtaccttccactaaatagacatatttcattagataataatatgttatatgataatagattacatcgtgaaagaacaataaatgcaatgatgcatggagttgaggaggatgaaaatgattactatatggaaagagataagtcgatgaagaaggttcaatatttaataaagacaaaagtaatgaggaataatactagaatcaacagactaaatgataacttcagaaatcaaatactaagatcctctatagatatacacaagcttacttttagtatagaagaaatatttaatgaggttaaaaacttaaaagtagaagaaatcaaagatatcaaaacatcttatataaacatattgaaaaatttgaatcaaataacccaaattgaagaaaaaaattatgttaatttttttgataattatataagagaaattaaagagaatgaaaatattgaggataattcagtttcaattcagttgattttaaaatataatgaaatagcaaaaataaaaaatatagtaaaactagccgaggatatggaaactaaaaaagcaaaagtagttgaatctgttaatttattttgtgaaactattaacagtttcatatcaaccgatggtacagaaaaaaaagaaatattaattgatgaaaacggaggtatatatttacaaaatgtaattgaaaaaaaacaattaagtatatataaactttcttctggggaaaagcaaattgtaattttttatgcaaacttaatttttggagtaaatgaaaataaaagaggtatatttattgttgatgaacctgaactatcgttacacttatcttggcaaaaattatttattgaaaaaactatagaattaaataaaaatatacaatttatatttgctactcattcgccagaaataataggtaaatattataataaaacattcgagttaaagaaaaagatagagatagatagatagatagatagatagatagatagatagatagatagatagatagatagatagatagatagatagatagatagatagatagatagatagatagatagataggagaaactcaataatatgaatcaattacaatactctgaagatgctttaaaaaataggtatctcttttttaaagaaataaatgaaataaatatttttgttgaagataaaggaaaagaatatgaatatgaggaaatattgtctaaagtttttgctgatgaatatcatatacagacgatatatgcactggggggtaaaccacaagttttatccgcatttagagactgtaaagaacatgtttctagcaataataatataaaaaacatatatcttttagatggtgattttgatcaatatttggataatatagtaatggaatcacatccacatattatttatttgcaatcatataatattgaaaattattttttgaatgaagaatcggtagtaacttttatgcaaggaaaaatgaaaatgctgaagaatgatgtaaggactaaaatagcttattctgaatggctttctaatacattatacaatatagaaaacatttttattttatattgtataattcaagaaaaggaattagggattcctaatgtaggggattctgaatataaagtaattaatatgatcgatggatctatcaatatgacgagatatgaggatttgaaaaagcaaataagtaattgtacagtaaacatagatttagtagagcaagaaatgaaagcaaaaattcacaatataaatcctaatgtgtttgatttgatttgtggtaaacatttgatttgtagtttgtaccgtcatctgttaaaaataactaaaggtttcagctatgatgaatttagatggcatttagttcaaaatgttgaagtatctagacttaattttataaaggaaagagttgctaatttgtaaacaaaaatgcatgtaaaaactaaattacactattatagtaaatacagcaaaaaaataaagtcttccccctttgttttttttgctgtattccccttatctgtttttgtgaatttttagtaatcatactaaactttccggcgacacgttcgcgccgctcaaggcatcagtctaggttgccttacacgc

SEQ ID NO: 4023 - DNA, 3025 bp, Listeria monocytogenes 4b specific
  misc_feature (1)..(end): n can be any nucleotide: a,g,c or t/u
tgccgtgtggattgtttttttgttggaagcaacagtttattctgattcgataaaaaaagacaagcaacaaattacgttacttatcttactaacgtataaaaaaacttaattttttttgaaaacagctcttttttgtatctccttaaacataagatagccatcggtttgtaagtaaggaattggtaataaggaatttatagcaataaataggctaaaaatctttataaatataaaatcaaaccctatccatattcccattgtcaaattaataacggcaggcatcaatagaatgagtgcttgctttcctaatccccaatttgaatcttcttcataagatacagaacagttaatgacaatgggtgaaatagcgacttttcttacattaaggaagaaaaagttacctattactaccttacctatctttcccttaaaaagtaggacaaagaaaatgtgggctaattcatgcaaaactaagactataacccaacttttataaatttctaaaatcattcttcttatcccggtaactcattaatagtaatgtgagcataaatatgatagctgaaccccccagtgtcggaagaatcattagcatacctatattatccccaataataactcgacttactaacaagcacgcaggcatactcaacaaaaaatctaatatcattattacataaataaaccgtttattctttctcggtgtaaaattcaaattagacatatcgtttaaaaagccattaattaaactaaatgattttcttccaaaaataaaaatcaacacagatactataagagaaaaaattactgatataagaagtatttttgctaaattttgtttataaaaagctacttgcgaaatactatccacataatttgaggcatattggtagcttggtccatgaacttttaaatagtttaagagttcatgttggtttttactagctagtttaatggaaataatagaaaaattagggttatcataattttctttctcaagctttaacaatatattatttaatttctcagaagtcttatcctcaacctcaacagttcctttactcacttgtttcgaataagagatcgctgctactggagagttaacgataccgactatttcatacaactcatcttcaaattctaatttattacctatagctgattcttcactaatatcatcatggaaaaattttttcagttgagcaaaagataacgcgatttctttagcatcgtcttttggaaaacgtcctttggttaagtgcattttagtaacaggaaaagcatttacatagttaggcgagtctgtaattatttccggaagagccaaaacttcaaacttggaattatccaaaacaaattcatttatatagctttcatctacaacataaatttgtttgatatagtctttgtcttgtaattcaatcaactcatttgtagtgagatgattaggttcctgaaattcagcttcaatttcactttccgtcatttcaatattaaaatatctagaataattctccgcaatatccatcaactcaaagttataatcactagttaaattctcttctattggaactgagcgtaaaataatagtggaggtaatattggttaataagatcgttagtactataataaacgcaaacatcaagaagttaaattttgaactaagtaaatattttaaaattcttccatttgaaacaactcttttactattaacttgaatctcgttctgctctatttcaacattagacgatacttctatcctatctttatctacaaaaatagttttatcaaaaaaatgctccaatcgagtatcatgactaactaagtaaataattttcgtttttgctaattcacttaaaatattagcaagtatctccgaggacttgttatctagattatttgtaggttcatctagaataattatagaagagtccaaagctaatgttctcactaattctactttgacaaattctccgccgcttaataattggatatctttttctaagtagtagttatctacagaaaacaactcgcaatacttttgaactaagctcggattagtttttgggaagtgtaaatatttctctacattagttttatatttccaatttttttgcgcaaagtaagctacatcttttactttatttgtgttattttttaattcattttcaataaaggttgtttttccgcttccgttactacctgtaattgtgtaaatacctggtttagtgatagaaaaaatgctaaatttatttattttattcatataatcgcctttctaatgttgtttttaattattaatggtatgacgatgtaggcaaaaaagaaaaatatcattactacacctattatggcggtaataagtaccgaatgaacaatactccacataattaaaagaaaaataacagtactaataaccgaaaagattttaaagtttgtaataagatacgttttttttctgaattgaagtagctctttttcattatagccataataagtcaatgtactataactatttttataactaacctcatacataattagtaaaattaataatactaagagtagtaagcatataagaagtgctactttttttatcagcataactgcattactgtattgattaacctcagcatttaataactctggttcatatcctttaataaatatttttttagcatatagtttattttctgctaagaaatcataaaatgattcttgagcttttaattgcacgtatgcttctgtaattaaaacatcttgttgatttacttttttcaaaatttgcgcatacacgctaggattaaattctatttctacctgatttgattgcaaagtattactataatgaagttcaaatcctagctgcttaattttagcttttttaatttctgttaaagttaaacttttaggcacgtggaaagatggactatcactattcttatagtaattgtagttntcgccattactaatgaattctgtctctgcgttcacctttaaatctccctttccacacactggcggc

SEQ ID NO: 4024 - DNA, 1619 bp, Listeria monocytogenes 4b specific
  misc_feature (1)..(end): n can be any nucleotide: a,g,c or t/u
gcgtaacaaaaaaagtgctacaaaccaactagcggtttgtagcacttttttatggagtggtttaacttcttttaaagaaaaagaagctagtagataacaacgtcaataaacttcctagtgcaaaaaagagagcatcttttgaatcaccagtagttgggaggatattagaggtgtttttatcaactttttttgttgcttcggatgaaatcacagtatcattagtactcagtgtagtattgtcggtcatttctccattggtatttgtattatcactgtttgctattttttcataaatataggtgacagttgcaggggttgtgctacaagtacccgattcatttccttccactttttgaagtttatagcctgctatgtctttgcttttagtttggtaggtattatttacttcaccggttaaaacagtatcttttgctagtgttttacccgattcatcttgatattttacagtgactgtcccattttggacagcagttttttcataaatatacgttacattttgcagtgtttcagaaaattgtcctgtcgcatttccgggtgtttcttttaaagtatagccatctattattttaggagtagtgacgtaattttcaccaatactaccatctaatctagtagaagtagctaattcattcccagacgcatctttataggaaactaggactggtttagtatacttgaagtagataaatggctttccagaaggaccatattcagaaatatcatagtaagaatcaaatcgatttgtcccagtgaaaagtgaaaaagtagattcgagtggctctgctgaaaagtttaatgctttttcggcttgattatacgtaataccattcgctaaatcagttatgaataaattatctgtagtcaaatgagccgaagcatcttgaaactgaatgtaattttctataggtaggatgtggttgcttggtacaatgagtgtacttaaaactgtttgagcggcaaaagcttgataagccatttgaagatttgggttttgaattgtaatattagtaataaaattattttcaaaggcagaagcatcaatactttcaacagtggctggtgtagtcactgtttttaaattattagctaaaaatgcttgggaaggaatattttttaaagcagtagaataagttattttttctaatttattgacactaaaagagttcctccctatagtctgcactgagttgggtaagactagttgttcaagtgaattgatggtaaaagcaccatcgccaatagttataactgtattaggaatcgttacattagttaatctcttggatttgaatgcgccattcccgatagcagtaacggtatattcattattagtaccaagtgttgtaggaatggtaatatcagtagactgtcctgtataatcagtaatggtagcttcatttccatttattgtatattcatagtcaccagatgtttcggcagaaccaatagttggaaataaaaacaagaatatggcaaaacaaaaaataccccaaaatcttctttgtaacacagaaaagcccccttacttgagtttttttatattttcccttacacaaaacatctaaacttttctatattcatatctgtgtggaataagt

SEQ ID NO: 4025 - DNA, 716 bp, Listeria monocytogenes 4b specific
  misc_feature (1)..(end): n can be any nucleotide: a,g,c or t/u
cagactgaatggatattggcgctttgcctggtttccggcaccagaagcggtgccggaaagctggctggagtgcgatcttcctgaggccgatactgtcgtcgtcccctcaaactggcagatgcacggttacgatgcgcccatctacaccaacgtgacctatcccattacggtcaatccgtcgtttgttcccacggagaatccgacgggttgttactcgctcacatttaatgttgatgaaagctggctacaggaaggccagacgcgaattatttttgatggcgttaactcggcgtttcatctgtggtgcaacgggcgctgggtcggttacggccaggacagtcgtttgccgtctgaatttgacctgagcgcatttttacgcgccggagaaaaccgcctcgcggtgatggtgctgcgctggagtgacggcagttatctggaagatcaggatatgtggcggatgagcggcattttccgtgacgtctcgttgctgcataaaccgactacacaaatcagcgatttccatgttgccactcgcttttatgatgatttcagccgcgctgtactggaggctgaatttcacatgtgcggccgagttgcgtgactacctacgggtaacagtttctttatggcagggtgaaacgcaggtcgccagcggcaccgcgcctttcggcggtgaaattatcgatgagcgtggtggttatgccgatcgccgtgcc
